(19) United States
(12) Patent Application Publication
(10) Pub. No.: US 2006/0280747 A1
(43) Pub. Date: Dec. 14, 2006

(54) Anti-VEGF antibodies

(75) Inventors: Germaine Fuh, Pacifica, CA (US); Hans-Peter Gerber, Bellevue, WA (US); Wei-Ching Liang, Foster City, CA (US); Frederic A. Fellouse, Toronto (CA); Sachdev S. Sidhu, San Francisco, CA (US); Christian Wiesmann, Brisbane, CA (US)

Correspondence Address: MERCHANT & GOULD PC, P.O. BOX 2903, MINNEAPOLIS, MN, 55402-0903, US

(73) Assignee: Genentech, Inc., South San Francisco, CA (US)

(21) Appl. No.: 11/342,249

(22) Filed: Jan. 27, 2006

Related U.S. Application Data
(63) Continuation of application No. PCT/US04/24662, filed on Jul. 30, 2004.
(60) Provisional application No. 60/491,877, filed on Aug. 1, 2003.
(60) Provisional application No. 60/516,495, filed on Nov. 1, 2003.
(60) Provisional application No. 60/570,912, filed on May 12, 2004.
(60) Provisional application No. 60/571,239, filed on May 13, 2004.
(60) Provisional application No. 60/576,315, filed on Jun. 1, 2004.
(60) Provisional application No. 60/580,757, filed on Jun. 18, 2004.

(51) Int. Cl. A61K 39/395; G01N 33/53; C07H 21/04; C12P 21/06; C40B 30/06; C40B 40/10; C07K 16/22

(52) U.S. Cl. 424/155.1; 435/7.1; 435/69.1; 435/320.1; 435/326; 530/388.25; 536/23.53

(57) ABSTRACT

Anti-VEGF antibodies and variants thereof, including those having high affinity for binding to VEGF, are disclosed. Also provided are methods of using phage display technology with naïve libraries to generate and select the anti-VEGF antibodies with desired binding and other biological activities. Further contemplated are uses of the antibodies in research, diagnostic and therapeutic applications.

### RELATED APPLICATIONS

[0001] This application claims benefit from U.S. Provisional Application No. 60/491,877, filed Aug. 1, 2003; 60/516,495, filed Nov. 1, 2003; 60/570,912, filed May 12, 2004; 60/571,239, filed May 13, 2004; 60/576,315, filed Jun. 1, 2004; and 60/580,757, filed Jun. 18, 2004.

### FIELD OF THE INVENTION

[0002] This invention relates generally to anti-VEGF selected polypeptide sequences and antibodies with beneficial properties foor research, therapeutic and diagnostic purposes.

### BACKGROUND OF THE INVENTION

Angiogenesis and VEGF

[0003] Angiogenesis is an important cellular event in which vascular endothelial cells proliferate, prune and reorganize to form new vessels from preexisting vascular network. There are compelling evidences that the development of a vascular supply is essential for normal and pathological proliferative processes (Folkman and Klagsbrun (1987) Science 235:442-447). Delivery of oxygen and nutrients, as well as the removal of catabolic products, represent rate-limiting steps in the majority of growth processes occurring in multicellular organisms. Thus, it has been generally assumed that the vascular compartment is necessary, albeit but not sufficient, not only for organ development and differentiation during embryogenesis, but also for wound healing and reproductive functions in the adult.

[0004] Angiogenesis is also implicated in the pathogenesis of a variety of disorders, including but not limited to, proliferative retinopathies, age-related macular degeneration, tumors, rheumatoid arthritis (RA), and psoriasis. Angiogenesis is a cascade of process consisting of 1) degradation of the extracellular matrix of a local venue after the release of protease, 2) proliferation of capillary endothelial cells, and 3) migration of capillary tubules toward the angiogenic stimulus. Ferrara et al. (1992) Endocrine Rev. 13:18-32.

[0005] In view of the remarkable physiological and pathological importance of angiogenesis, much work has been dedicated to the elucidation of the factors capable of regulating this process. It is suggested that the angiogenesis process is regulated by a balance between pro- and anti-angiogenic molecules, and is derailed in various diseases, especially cancer. Carmeliet and Jain (2000) Nature 407:249-257.

[0006] Vascular endothelial cell growth factor (VEGF), a potent mitogen for vascular endothelial cells, has been reported as a pivotal regulator of both normal and abnormal angiogenesis. Ferrara and Davis-Smyth (1997) Endocrine Rev. 18:4-25; Ferrara (1999) J. Mol. Med. 77:527-543. Compared to other growth factors that contribute to the processes of vascular formation, VEGF is unique in its high specificity for endothelial cells within the vascular system. Recent evidence indicates that VEGF is essential for embryonic vasculogenesis and angiogenesis. Carmeliet et al. (1996) Nature 380:435-439; Ferrara et al. (1996) Nature 380:439-442. Furthermore, VEGF is required for the cyclical blood vessel proliferation in the female reproductive tract and for bone growth and cartilage formation. Ferrara et al. (1998) Nature Med. 4:336-340; Gerber et al. (1999) Nature Med. 5:623-628.

[0007] In addition to being an angiogenic factor in angiogenesis and vasculogenesis, VEGF, as a pleiotropic growth factor, exhibits multiple biological effects in other physiological processes, such as endothelial cell survival, vessel permeability and vasodilation, monocyte chemotaxis and calcium influx. Ferrara and Davis-Smyth (1997), supra. Moreover, recent studies have reported mitogenic effects of VEGF on a few non-endothelial cell types, such as retinal pigment epithelial cells, pancreatic duct cells and Schwann cells. Guerrin et al. (1995) J. Cell Physiol. 164:385-394; Oberg-Welsh et al. (1997) Mol. Cell. Endocrinol. 126:125-132; Sondell et al. (1999) J. Neurosci. 19:5731-5740.

[0008] Substantial evidence also implicates VEGFs critical role in the development of conditions or diseases that involve pathological angiogenesis. The VEGF mRNA is overexpressed by the majority of human tumors examined (Berkman et al. J Clin Invest 91:153-159 (1993); Brown et al. Human Pathol. 26:86-91 (1995); Brown et al. Cancer Res. 53:4727-4735 (1993); Mattern et al. Brit. J. Cancer. 73:931-934 (1996); and Dvorak et al. Am J. Pathol. 146:1029-1039 (1995)). Also, the concentration of VEGF in eye fluids are highly correlated to the presence of active proliferation of blood vessels in patients with diabetic and other ischemia-related retinopathies (Aiello et al. N. Engl. J. Med. 331:1480-1487 (1994)). Furthermore, recent studies have demonstrated the localization of VEGF in choroidal neovascular membranes in patients affected by AMD (Lopez et al. Invest. Ophtalmo. Vis. Sci. 37:855-868 (1996)).

[0009] The recognition of VEGF as a primary regulator of angiogenesis in pathological conditions has led to numerous attempts to block VEGF activities. Inhibitory anti-VEGF receptor antibodies, soluble receptor constructs, antisense strategies, RNA aptamers against VEGF and low molecular weight VEGF receptor tyrosine kinase (RTK) inhibitors have all been proposed for use in interfering with VEGF signaling (Siemeister et al. Cancer Metastasis Rev. 17:241-248 (1998). Indeed, anti-VEGF neutralizing antibodies have been shown to suppress the growth of a variety of human tumor cell lines in nude mice (Kim et al. Nature 362:841-844 (1993); Warren et al. J. Clin. Invest. 95:1789-1797 (1995); Borgström et al. Cancer Res. 56:4032-4039 (1996); and Melnyk et al. Cancer Res. 56:921-924 (1996)) and also inhibit intraocular angiogenesis in models of ischemic retinal disorders (Adamis et al. Arch. Ophthalmol. 114:66-71 (1996)). Therefore, anti-VEGF monoclonal antibodies or other inhibitors of VEGF action are promising candidates for the treatment of solid tumors and various intraocular neovascular disorders. Although the VEGF molecule is upregulated in tumor cells, and its receptors are upregulated in tumor infiltrated vascular endothelial cells, the expression of VEGF and its receptors remain low in normal cells that are not associated with angiogenesis.

Therapeutic Antibodies

[0010] Monoclonal antibodies can be manufactured using recombinant DNA technology. Widespread use has been made of monoclonal antibodies, particularly those derived from rodents, however nonhuman antibodies are frequently antigenic in humans. The art has attempted to overcome this problem by constructing “chimeric” antibodies in which a nonhuman antigen-binding domain is coupled to a human constant domain (Cabilly et al., U.S. Pat. No. 4,816,567). The isotype of the human constant domain may be selected to tailor the chimeric antibody for participation in antibody-dependent cellular cytotoxicity (ADCC) and complement-dependent cytotoxicity. In a further effort to resolve the antigen binding functions of antibodies and to minimize the use of heterologous sequences in human antibodies, humanized antibodies have been generated for various antigens in which substantially less than an intact human variable domain has been substituted at regions by the corresponding sequence from a nonhuman species. For example, rodent (CDR) residues have been substituted for the corresponding segments of a human antibody. In practice, humanized antibodies are typically human antibodies in which some complementarity determining region (CDR) residues and possibly some framework region (FR) residues are substituted by residues from analogous sites in rodent antibodies. Jones et al., Nature 321:522-525 (1986); Riechmann et al., Nature 332:323-327 (1988); Verhoeyen et al., Science 239:1534-1536 (1988).

[0011] Several humanized anti-human VEGF antibodies have been successfully generated, and have shown significant huVEGF-inhibitory activities both in vitro and in vivo. Presta et al. (1997) Cancer Research 57:4593-4599; Chen et al. (1999) J. Mol. Biol. 293:865-881. One specific humanized anti-VEGF antibody, the Avastin™ antibody, is currently used in several clinical trials for treating various solid tumors; and another high-affinity variant of the humanized anti-VEGF antibody is currently clinically tested for treating choroidal neovascularization related age macular degeneration (AMD).

[0012] Prior to administering a therapeutic antibody to human, preclinical studies in nonhuman mammals are generally desired to evaluate the efficacy and/or toxicity of the antibody. Ideally, the antibodies subject to these studies are capable of recognizing and reacting with high potency to a target antigen endogenous to the host animal such as mouse or nonhuman primate.

Phage Display

[0013] Phage display technology has provided a powerful tool for generating and selecting novel proteins that bind to a ligand, such as an antigen. Using the technique of phage display, large libraries of protein variants can be generated and rapidly sorted for those sequences that bind to a target antigen with high affinity. Nucleic acids encoding variant polypeptides are fused to a nucleic acid sequence encoding a viral coat protein, such as the gene III protein or the gene VIII protein. Monovalent phage display systems where the nucleic acid sequence encoding the protein or polypeptide is fused to a nucleic acid sequence encoding a portion of the gene III protein have been developed. (Bass, S., Proteins, 8:309 (1990); Lowman and Wells, Methods: A Companion to Methods in Enzymology, 3:205 (1991)). In a monovalent phage display system, the gene fusion is expressed at low levels and wild type gene III proteins are also expressed so that infectivity of the particles is retained. Methods of generating peptide libraries and screening those libraries have been disclosed in many patents (e.g., U.S. Pat. No. 5,723,286, U.S. Pat. No. 5,432,018, U.S. Pat. No. 5,580,717, U.S. Pat. No. 5,427,908 and U.S. Pat. No. 5,498,530).

[0014] The demonstration of expression of peptides on the surface of filamentous phage and the expression of functional antibody fragments in the periplasm of E. coli was important in the development of antibody phage display libraries. (Smith et al., Science (1985), 228:1315; Skerra and Pluckthun, Science (1988), 240:1038). Libraries of antibodies or antigen binding polypeptides have been prepared in a number of ways including by altering a single gene by inserting random DNA sequences or by cloning a family of related genes. Methods for displaying antibodies or antigen binding fragments using phage display have been described in U.S. Pat. Nos. 5,750,373, 5,733,743, 5,837,242, 5,969,108, 6,172,197, 5,580,717, and 5,658,727. The library is then screened for expression of antibodies or antigen binding proteins with desired characteristics.

[0015] Phage display technology has several advantages over conventional hybridoma and recombinant methods for preparing antibodies with the desired characteristics. This technology allows the development of large libraries of antibodies with diverse sequences in less time and without the use of animals. Preparation of hybridomas or preparation of humanized antibodies can easily require several months of preparation. In addition, since no immunization is required, phage antibody libraries can be generated for antigens which are toxic or have low antigenicity (Hogenboom, Immunotechniques (1988), 4:1-20). Phage antibody libraries can also be used to generate and identify novel therapeutic antibodies.

[0016] Phage display libraries have been used to generate human antibodies from immunized non-immunized humans, germ line sequences, or naïve B cell Ig repertories (Barbas & Burton, Trends Biotech (1996), 14:230; Griffiths et al., EMBO J. (1994), 13:3245; Vaughan et al., Nat. Biotech. (1996), 14:309; Winter EP 0368 684 B1). Naïve, or nonimmune, antigen binding libraries have been generated using a variety of lymphoidal tissues. Some of these libraries are commercially available, such as those developed by Cambridge Antibody Technology and Morphosys (Vaughan et al. (1996) Nature Biotech 14:309; Knappik et al. (1999) J. Mol. Biol. 296:57). However, many of these libraries have limited diversity.

[0017] The ability to identify and isolate high affinity antibodies from a phage display library is important in isolating novel antibodies for therapeutic use. Isolation of high affinity antibodies from a library is dependent on the size of the library, the efficiency of production in bacterial cells and the diversity of the library. See, for e.g., Knappik et al., J. Mol. Biol. (1999), 296:57. The size of the library is decreased by inefficiency of production due to improper folding of the antibody or antigen binding protein and the presence of stop codons. Expression in bacterial cells can be inhibited if the antibody or antigen binding domain is not properly folded. Expression can be improved by mutating residues in turns at the surface of the variable/constant interface, or at selected CDR residues. (Deng et al., J. Biol. Chem. (1994), 269:9533, Ulrich et al., PNAS (1995), 92:11907-1911; Forsberg et al., Biol. Chem. (1997), 272:12430). The sequence of the framework region is a factor in providing for proper folding when antibody phage libraries are produced in bacterial cells.

[0018] Generating a diverse library of antibodies or antigen binding proteins is also important to isolation of high affinity antibodies. Libraries with diversification in limited CDRs have been generated using a variety of approaches. See, for e.g., Tomlinson, Nature Biotech. (2000), 18:989-994. CDR3 regions are of interest in part because they often are found to participate in antigen binding. CDR3 regions on the heavy chain vary greatly in size, sequence and structural conformation.

[0019] Others have also generated diversity by randomizing CDR regions of the variable heavy and light chains using all 20 amino acids at each position. It was thought that using all 20 amino acids would result in a large diversity of sequences of variant antibodies and increase the chance of identifying novel antibodies. (Barbas, PNAS 91:3809 (1994); Yelton, D E, J. Immunology, 155:1994 (1995); Jackson, J. R., J. Immunology, 154:3310 (1995) and Hawkins, R E, J. Mol. Biology, 226:889 (1992)).

[0020] There have also been attempts to create diversity by restricting the group of amino acid substitutions in some CDRs to reflect the amino acid distribution in naturally occurring antibodies. See, Garrard & Henner, Gene (1993), 128:103; Knappik et al., J. Mol. Biol. (1999), 296:57. However, these attempts have had varying success and have not been applied in a systematic and quantitative manner. Creating diversity in the CDR regions while minimizing the number of amino acid changes has been a challenge.

### SUMMARY OF THE INVENTION

[0021] The present invention provides novel antibodies and polypeptide sequences. The present invention also provides antibodies capable of binding to rodent VEGF and human VEGF with Kd values within 10 fold of each value and are capable of inhibiting the binding of VEGF to a VEGF receptor. According to one embodiment, the antibody is capable of binding to either one or both of a Gly88Ala (G88A) or a Gly88Ser (G88S) human VEGF mutant with a Kd value that is within 10 fold of the Kd value of unmutated human VEGF.

[0022] The present invention provides antibodies that are capable of binding to a human VEGF and a mouse VEGF with Kd values that are 10 nM or less at 25° C. and are capable of inhibiting the binding of VEGF to a VEGF receptor. According to another embodiment the Kd values are 2 nM or less. According to another embodiment, the Kd values are 0.1 nM or less. According to another embodiment, an antibody of this invention binds VEGF with a Kd of no more than about 1 nM, or no more than about 500 μM.

[0023] The present invention also provides antibodies that are capable of binding to a human VEGF and to either one or both G88A and G88S mutants of human VEGF with Kd values that are 10 nM or less and are capable of inhibiting the binding of VEGF to a VEGF receptor. In another embodiment, the antibodies bind to a human VEGF and to either one or both human VEGF G88A and G88S mutants with Kd values that are 10 nM or less.

[0024] According to another embodiment, an antibody of this invention has an on-rate (kₒₙ) for binding to human and/or mouse VEGF that is 1.0 or more (10 M⁻¹ S⁻¹). According to another embodiment, the on-rate is 5.0 or more (10 M⁻¹ S⁻¹). According to yet another embodiment, the on-rate is 10.0 or more (10 M⁻¹ S⁻¹).

[0025] According to another embodiment, the antibodies of this invention contact less than 80% of the total surface area (angstrom²) of G88 of human VEGF. According to another embodiment, the antibodies of this invention contact less than 70% of the total surface area (angstrom²) of G88 of human VEGF. According to another embodiment, the antibodies of this invention contact less than 60% of the total surface area (angstrom²) of G88 of human VEGF. According to another embodiment, the antibodies of this invention contact less than 1% of the total surface area (angstrom²) of G88 of human VEGF. Such antibodies are generally capable of also binding mouse VEGF.

[0026] The VEGF receptor to be inhibited from binding to VEGF can be the VEGF receptor 1 (Flt-1), VEGF receptor 2 (Flt-1) or both receptors.

[0027] According to one embodiment, an antibody of this invention contacts the 20s helix of VEGF. According to another embodiment, an antibody of this invention contacts the 80s loop of VEGF. According to yet another embodiment, an antibody of this invention contacts the 20s helix and the 80s loop of human VEGF.

[0028] According to one embodiment, an antibody of this invention has relative affinity for or is capable of contacting any one of residues F17, M18, Q22, Y25, D63, L66, C104 and P106 of human VEGF. According to another embodiment, an antibody of this invention has relative affinity for or is capable of contacting F17, M18, Q22, Y25, D63, L66, C104 and P106 of human VEGF. According to another embodiment, an antibody of this invention has relative affinity for or is capable of contacting residues F17 and Y21 of human VEGF. According to another embodiment, an antibody of this invention has further relative affinity for or is capable of contacting Y25 of VEGF. According to another embodiment, an antibody of this invention has relative affinity for or is capable of contacting M18 and Q89 human VEGF. According to another embodiment, an antibody of this invention has relative affinity for or is capable of contacting M18, Y21 and Y25 of human VEGF. According to a preferred embodiment, an antibody of this invention has a combination of three or more of any one of the above-mentioned embodiments.

[0029] In a further embodiment, an antibody of this invention has a functional epitope described herein. According to one embodiment, the functional epitope of an antibody according to this invention includes residue F17 of human VEGF. According to another embodiment, the functional epitope of an antibody according to this invention includes residues F17 and I83 of human VEGF. According to a further embodiment, the functional epitope of includes residues F17, I83 and Q89 of human VEGF. According to one embodiment, the functional epitope of an antibody according to this invention includes residues F17 and M18 of human VEGF. In a further embodiment, the functional epitope includes residues F17, M18 and I89 of human VEGF. According to one embodiment, the functional epitope of an antibody according to this invention includes residues F17, Y21 and Y25 of human VEGF. According to a further embodiment, the functional epitope includes residues F17, Y21, Q22, Y25, D63 and I83 of human VEGF. According to an alternative embodiment, the functional epitope includes residues F17, Y21, Y25 and Q89 of human VEGF. According to a further embodiment, the functional epitope includes residues F17, M18, D19, Y21, Y25, Q89, I91, K101, E103, and C104 of human VEGF. According to yet another embodiment, the functional epitope includes residues 17, Y21, Q22, Y25, D63, I83 and Q89 of human VEGF. A functional epitope of an antibody according to this invention can include a combination of any of the residues selected from the group consisting of F17, M18, Y21, Q22, Y25, K48, D63, L66, M81, I83, H86, Q89, I91, C104 and P106 of human VEGF According to another embodiment, the functional epitope includes residues F17, M18, Y21, Q22, Y25, K48, D63, L66, M81, I83, H86, Q89, I91, C104 and P106 of human VEGF.

[0030] According to one embodiment, an antibody of this invention comprises a CDR-H3 comprising the contiguous amino acid sequence X₁X₂FX₄X₅X₆X₇, wherein

[0031] X₁ is Y or F;

[0032] X₂ is V or A;

[0033] X₄ is F or Y;

[0034] X₅ is L or A;

[0035] X₆ is P or A; and

[0036] X₇ is Y or F.

[0037] According to another embodiment, the antibody further comprises a CDR-H2 having a contiguous amino acid sequence GX₂TPX₅G, wherein

[0038] X₂ is a I or V or other hydrophobic amino acid; and

[0039] X₅ is any amino acid residue.

[0040] According to yet another embodiment, the antibody still further comprises a CDR-H1 having a contigous amino acid sequence X₁X₂X_{3z}IH, wherein

[0041] X₁ is any amino acid residue;

[0042] X₂ is Y or F; and

[0043] X₃ is W or L.

[0044] According to one preferred embodiment, the antibody further comprises the CDR-L1, CDR-L2 and CDR-L3 of any one of the antibodies of FIG. 7. According to another embodiment, the CDR-L1 is located at approximately residues 28-33, the CDR-L2 is located at approximately residues 50-55; and the CDR-L3 is located at approximately residues 91-96. According to another embodiment, the CDR-H1 is located at approximately residues 30-33, the CDR-H2 is located at approximately residues 50-58; and the CDR-L3 is located at approximately residues 94-100a. According to one preferred embodiment, the antibody comprises the framework regions of the G6 antibody, the G6-23 antibody or the G6-31 antibody. According to another embodiment, the antibody comprises the light chain CDRs or the light chain variable region of the G6 antibody, the G6-23 antibody or the G6-31 antibody.

[0045] According to one embodiment, an antibody of this invention is an antibody comprising:

[0046] (a) a CDR-L1 comprising the contiguous amino acid sequence X₁X₂X₃X₄X₅L, wherein:

[0047] X₁ and X₂ are any amino acid;

[0048] Either X₃ or X₄ or both X₃ and X₄ are R;

[0049] X₅ is S or A; and

[0050] (b) a CDR-L2 comprising a contiguous amino acid sequence X₁X₂X₃, wherein

[0051] X₁ is S or A or G; and

[0052] X₂ and X₃ is any amino acid residue; and

[0053] (c) a CDR-L3 comprising a contigous amino acid sequence SX₁X₂X₃PL, wherein

[0054] X₁ and X₂ are any amino acid residue; and

[0055] X₃ is S or A.

[0056] According to one preferred embodiment, the antibody comprises the framework regions of the B20-4.1 antibody or the B20-4 antibody. According to another embodiment, the antibody comprises the CDRs or the variable region of the B20 heavy chain variable region. According to another embodiment, the X₁X₂X₃ of the CDR-L2 is encoded by X₁ASX₄LX₆, wherein X₄ and X₆ are any amino acid. According to another embodiment, the CDR-L1 is located at approximately residues 28-33, the CDR-L2 is located at approximately residues 50-55; and the CDR-L3 is located at approximately residues 91-96. According to another embodiment, the CDR-H1 is located at approximately residues 30-33, the CDR-H2 is located at approximately residues 50-58; and the CDR-L3 is located at approximately residues 94-100a.

[0057] Also contemplated is an antibody comprising a CDR-H3 sequence of any one of the antibodies of FIGS. 7, 24-29 and 34-43 and optionally further comprising a CDR-H2 and/or a CDR-H1 of the same antibody from FIGS. 7, 24-29 and 34-43. Also, contemplated is an antibody selected from the group consisting of a G6 series antibody, a B20 series antibody, YADS series antibody and a YS series antibody. Further, another antibody of this invention is an antibody comprising a variable region of any one of the antibodies of FIGS. 7, 24-29 and 34-43.

[0058] According to one preferred embodiment, the antibodies of this invention are synthesized by recombinant methods rather than produced directly from a hybridoma or derived from an antibody sequence from a hybridoma. In one preferred embodiment, the antibody binds to hVEGF with a Kd value of no more than about 2 nM, no more than about 1 nM, or no more than about 500 pM. According to one embodiment, antibody is a monoclonal antibody. According to another embodiment, the antibody is a multi-specific antibody (e.g., a bispecific antibody).

[0059] In a further embodiment of the invention, the high affinity anti-hVEGF antibody is also capable of binding to a VEGF from a non-human mammal species with Kd values comparible to, or at least within ten-fold of, the Kd value for its hVEGF binding. Such antibodies with cross-species high binding affinities are particularly useful for preclinical research as well as diagnostic and therapeutic applications. Some of the antibodies intended for therapeutic use were generated using a target human antigen as the immunogen. The resultant antibody may be “species-dependent”, i.e. while binding specifically to human antigen, it may be much less effective at binding a homologue of that antigen from a nonhuman mammal. This is found herein to be problematic, particularly where the nonhuman mammal is one in which preclinical studies of the antibody are to be carried out. An example is the anti-VEGF antibody, the Avastin™ antibody, used for treating cancers. While the Avastin™ antibody had a strong binding affinity for human VEGF (i.e. K_{d} 1.8 nM), the affinity for murine VEGF was unsuitable for conducting experiments in mouse models.

[0060] In one aspect, the antibodies are synthetic antibodies comprising at least one variant CDR in its variable domains, wherein the variant CDR comprises variant amino acid in at least one solvent accessible and highly diverse amino acid position, wherein the variant amino acid is encoded by a nonrandom codon set, and wherein at least 70% of the amino acids encoded by the nonrandom set are target amino acids for that position in known antibody variable domains. The antibody may have a heavy chain variable domain which comprises at least 1, 2 or 3 variant CDRs selected from the group consisting of CDR H1, H2 and H3. Preferably the heavy chain variable domain comprises a variant CDR H3. The antibody may also have a light chain variable domain which comprises at least 1, 2 or 3 variant CDRs selected from the group consisting of CDR L1, L2 and L3.

[0061] According to another embodiment, an antibody of this invention binds human VEGF and a rodent VEGF with a desired affinity but does not bind to any one or all of the VEGF-related homologues selected from the group consisting of human VEGF-B, human VEGF-D, and human PIGF-2.

[0062] According to one preferred embodiment, an antibody of this invention has a combination of three or more of any one of the above-mentioned embodiments. According to another embodiment, a Fab antibody of this invention is conjugated to an agent the will increase the half-life of the Fab antibody. According to one preferred embodiment, the agent is a polypeptide comprising the sequence DICLPRWGCLW. In a preferred embodiment, the antibodies of this invention do not bind to PIGF, VEGF-D or VEGF-B.

[0063] The invention also provide a method of selecting a hVEGF antibody from a library of synthetic antibodies comprising: a) generating the library of synthetic antibodies having a designed diversity in at least one of the CDRs; b) contacting the library with hVEGF to form binders; c) separating the binders from the nonbinders, and eluting the binders from the target hVEGF and incubating the binders in a solution with decreasing amounts of the target hVEGF in a concentration from about 0.1 nM to 1000 nM; and c) selecting the binders that can bind to the lowest concentration of the target VEGF and that have an affinity of about 500 pM to 2 nM.

[0064] Also contemplated are variants of the synthetic antibodies with improved binding affinities to hVEGF or to VEGF of non-human species, or both. Various forms of the antibody and variants thereof are contemplated herein. For example, the antibody mutant may be a full length antibody (e.g. having a human immunoglobulin constant region) or an antibody fragment (e.g. a Fab or F(ab′)₂). Furthermore, the antibody mutant may be labeled with a detectable label, immobilized on a solid phase and/or conjugated with a heterologous compound (such as a cytotoxic agent).

[0065] Diagnostic and therapeutic uses for the antibody are contemplated. In one diagnostic application, the invention provides a method for determining the presence of a protein of interest comprising exposing a sample suspected of containing the protein to the antibody mutant and determining binding of the antibody mutant to the sample. For this use, the invention provides a kit comprising the antibody mutant and instructions for using the antibody mutant to detect the protein.

[0066] The invention further provides: isolated nucleic acid encoding the antibody; a vector comprising the nucleic acid, optionally, operably linked to control sequences recognized by a host cell transformed with the vector; a host cell transformed with the vector, a process for producing the antibody comprising culturing this host cell so that the nucleic acid is expressed and, optionally, recovering the antibody mutant from the host cell culture (e.g. from the host cell culture medium).

[0067] The invention also provides a composition comprising the antibody and a pharmaceutically acceptable carrier or diluent. This composition for therapeutic use is sterile and may be lyophilized. Also contemplated is the use of an antibody or polypeptide of this invention in the manufacture of a medicament for treating an indication described herein. The composition can further comprise a second thereapeutic agent such as a chemotherapeutic agent, a cytotoxic agent or an anti-angiogenic agent.

[0068] The invention further provides a method for treating a mammal, comprising administering an effective amount of the antibody to the mammal. The mammal to be treated in the method may be a nonhuman mammal, e.g. a primate suitable for gathering preclinical data or a rodent (e.g., mouse or rat or rabbit). The nonhuman mammal may be healthy (e.g. in toxicology studies) or may be suffering from a disorder to be treated with the antibody of interest. In one embodiment, the mammal is suffering from or is at risk of developing abnormal angiogenesis (e.g., pathological angiogenesis). In one specific embodiment, the disorder is a cancer selected from the group consisting of colorectal cancer, renal cell carcinoma, ovarian cancer, lung cancer, non-small-cell lung cancer (NSCLC), bronchoalveolar carcinoma and pancreatic cancer. In another embodiment, the disorder is a disease caused by ocular neovascularisation, e.g., diabetic blindness, retinopathies, primarily diabetic retinopathy, age-induced macular degeneration and rubeosis. In another embodiment, the mammal to be treated is suffering from or is at risk of developing an edema (e.g., an edema associated with brain tumors, an edema associated with stroke, or a cerebral edema). In another embodiment, the mammal is suffering from or at risk of developing a disorder or illness selected from the group consisting of rheumatoid arthritis, inflammatory bowel disease, refractory ascites, psoriasis, sarcoidosis, arterial arteriosclerosis, sepsis, burs and pancreatitis. According to another embodiment, the mammal is suferring from or is at risk of developing a genitourinary illness selected from the group consisting of polycystic ovarian disease (POD), endometriosis and uterine fibroids. The amount of antibody administered will be a therapeutically effective amount to treat the disorder. In dose escalation studies, a variety of doses of the antibody may be administered to the mammal. In another embodiment, a therapeutically effective amount of the antibody is administered to a human patient to treat a disorder in that patient. In one preferred embodiment, antibodies of this invention useful for treating inflammatory or immune diseases described herein (e.g., rheumatoid arthritis) are Fab or scFv antibodies, especially Fab or scFv antibodies derived from the G6 series of antibodies or the B20 series of antibodies. Antibodies that do not cause aggregation of VEGF and do not aggregate themselves such as the B20 series of IgG antibodies are particularly useful in treating inflammatory and immune diseases. Accordingly, such antibodies are can be can be used in the manufacture of a medicament for treating an inflammatory or immune disease. A mammal that is suffering from or is at risk for developing a disorder or illness described herein can be treated by administering, a second therapeutic agent, simultaneously, sequentially or in combination with, an antibody of this invention. It should be understood that other therapeutic agents, in addition to the second therapeutic agent, can be administered to the mammal or used in the manufacture of a medicament for the desired indications.

[0069] These antibodies and polypeptides can be used to understand the role of host stromal cell collaboration in the growth of implanted non-host tumors, such as in mouse models wherein human tumors have been implanted. These antibodies and polypeptides can be used in methods of identifying human tumors that can escape anti-VEGF treatment by observing or monitoring the growth of the tumor implanted into a rodent or rabbit after treatment with an anti-VEGF antibodies of this invention. The antibodies and polypeptides of this invention can also be used to study and evaluate combination therapies with anti-VEGF antibodies of this invention and other therapeutic agents. The antibodies and polypeptides of this invention can be used to study the role of VEGF in other diseases by administering the antibodies or polypeptides to an animal suffering from the disease of a similar disease and determining whether one or more symptoms of the disease are alleviated.

### BRIEF DESCRIPTION OF THE DRAWINGS

[0070] FIG. 1 is a schematic illustration of various types of antibody fragments useful for phage display.

[0071] FIG. 2 compares residue changes within heavy chain CDRs of the template antibody h4D5 and the four selected novel synthetic antibodies. Also compared are VEGF bindings of the four antibodies.

[0072] FIG. 3 depicts the abilities of VEGF receptors (Flt1-d2 and KDR) to block VEGF bindings of the novel anti-VEGF antibodies. Y0959A, an anti-VEGF variant, was used as control.

[0073] FIG. 4 shows that the G6 antibody specifically binds to both hVEGF and mVEGF, but not to VEGF-related antigens.

[0074] FIG. 5 shows that G6 can effectively block both hVEGF and mVEGF binding to the KDR receptor. Fab-12 and Y0317 were used as controls.

[0075] FIG. 6 shows effects of G6 on VEGF-induced HUVEC proliferation.

[0076] FIG. 7 illustrates steps of generating high affinity anti-VEGF antibodies and the list of residues and binding affinities related to various affinity-improved G6 variants.

[0077] FIG. 8 compares VEGF bindings of G6, G6-23 and Fab-12. Association rates (on-rate) to both hVEGF and mVEGF were measured over time; the calculated Kon, Koff and Kd are listed.

[0078] FIG. 9 compares VEGF binding on-rates of G6 and further improved variants of G6-23.

[0079] FIG. 10 depicts effects of VEGF antagonists (G6-23 and Flt1-3Fc) on neonate mice body weights and survival rates.

[0080] FIG. 11 depicts effects of G6-23 on tumor growth in nude mice with xenografted human tumor cells (KM12 cells and SW480 cells), as measured by tumor volumes over number of treatment days.

[0081] FIG. 12 shows VEGF expressions (both hVEGF and mVEGF) in KM12 xenograft mice in the presence or absence of G6-23.

[0082] FIG. 13 depicts effects of VEGF antagonists (G6-23 and Flt1-3Fc) on tumor growth in nude mice with xenografted mouse tumor (LL2), as measured by tumor volumes over number of treatment days.

[0083] FIGS. 14A and B describe codons designed for shotgun scanning codons of G6 and G6-23. For each scan, degenerate shotgun codons for (A) heavy and (B) light chain were designed to encode the wild-type amino acid and alanine (m1) in alanine-scan or similar amino acid (m4) in homolog-scan for both G6 and G6-23 Fab. The shotgun codons are represented by the IUB code (K=G/T, M=A/C, R=A/G, S=G/C, V=A/C/G, W=A/T, Y=C/T). More substitutions (m2, m3, and m5) occurred in some residues due to the nature of the genetic code. In the case of wild-type alanine, the shotgun codon was designed to encode alanine and glycine. Each residue on CDRs is denoted by the single-letter code for amino acid, followed by a number denoting its position according to the scheme of Kabat et al., 1987. In positions where the sequences of G6 and G6-23 differ were shown in two letters, e.g. Q89K denotes position 89 which is Gln or Lys in G6 or G6-23, respectively. Asterisks (*) indicate both alanine- and homolog-scan codons encode a common substitution.

[0084] FIG. 15 provides information regarding the construction of G6 and G6-23 shotgun scanning libraries. The shotgun scanning libraries were performed to mutate codons for the indicated residues on the heavy (hc) or light (lc) chain of G6 and G6-23 with either alanine- or homolog-scan shotgun codons (FIGS. 14A and B). In total, eight libraries were constructed using the mutagenic oligonucleotides as shown in Example 1. The theoretical diversity of each library, total numbers of amino acid combinations encoded by the mutagenic oligonucleotides, was exceeded at least 100-fold by the actual diversity of the constructed library.

[0085] FIGS. 16A and B describe the results of the G6 and G6-23 heavy chain shotgun scan. The effect of each mutation (FIGS. 14A and B) on the heavy chain CDR residues of (A) G6 and (B) G6-23 was evaluated by calculating wt/mut ratios from sequences of functional clones, either from the alanine-scan libraries (m1, m2, and m3) or the homolog-scan libraries (m4 and m5), isolated after binding selection to either hVEGF (target selection) or an anti-gD tag antibody (display selection). To provide a quantitative estimate of the effect of each mutation on the binding affinity of G6 and G6-23 for hVEGF, the function ratio (Fwt/mut) at each mutation site was derived from dividing the wt/mut ratio from target selection by that from display selection. Deleterious effects are indicated by Fwt/mut values greater than 1.0, and mutations that result in significantly deleterious effects (Fwt/mut>10) are shown in bold text. Several mutations were not observed amongst the target selection and only a lower limit could be defined for its wt/mut ratio; therefore, the Fwt/mut value was indicated as a greater sign.

[0086] FIGS. 17A and B describe the results of the G6 and G6-23 light chain shotgun scan. The effect of each mutation (FIGS. 14A and B) on the light chain CDR residues of (A) G6 and (B) G6-23 was evaluated by calculating wt/mut ratios from sequences of functional clones, either from the alanine-scan libraries (m1, m2, and m3) or the homolog-scan libraries (m4 and m5), isolated after binding selection to either hVEGF (target selection) or an anti-gD tag antibody (display selection). To provide a quantitative estimate of the effect of each mutation on the binding affinity of G6 and G6-23 for hVEGF, the function ratio (Fwt/mut) at each mutation site was derived from dividing the wt/mut ratio from target selection by that from display selection. Deleterious effects are indicated by Fwt/mut values greater than 1.0, and mutations that result in significantly deleterious effects (Fwt/mut>10) are shown in bold text.

[0087] FIG. 18 is a comparison of relative binding activities for FabG6 and G6-23 point mutants to hVEGF with function values (Fwt/mut) from shotgun scanning. The relative binding activities of each mutant protein to hVEGF were evaluated with IC50, mut/IC50, wt ratio, a measure of the fold reduction in hVEGF binding activity due to each point mutation. The IC50, wt values for G6 and G6-23 are 2.5 nM and 20 pM respectively. The ratio without showing the standard error is estimated the error is ±5%. The ratios of significantly deleterious mutations could not be precisely quantitated because no inhibition was observed at the highest concentratrion of hVEGF (1 uM and 0.1 uM for G6 and G6-23 respectively) used in the assay and were only shown as a lower limit (>400 and >5000 for G6 and G6-23 mutants respectively) for fold reduction in hVEGF binding. The function values (Fwt/mut) of shotgun scanning were from FIGS. 16 and 17. DDGmut-wt values for both mutagenesis scanning were calculated using the equation as indicated in the legend of FIGS. 22A and B.

[0088] FIG. 19 describes the relative binding affinities for as measured by phage ELISAs for phage-derived hVEGF₁₋₁₀₉ single alanine mutant to bind different versions of anti-hVEGF antibodies or hVEGF receptors (G6, G6-23, and B20-4 Fabs, monoclonal antibody A4.6.1 and receptors Flt-1 (1-3), Fit-1_{D2} and KDR-Ig, respectively). The effects of phage-derived single alanine mutants of hVEGF on the binding affinity of anti-hVEGF antibody and hVEGF receptor were assessed as the relative IC50 values, which are calculated as IC_{50, ala}/ID_{50, wt} from phage ELISAs. A number greater than 1.0 indicated reduction in binding affinity and any variant with significant relative IC50 values greater than 10 was highlighted as bold text. The IC5_{0,wt} values for G6 and G6-23 are 2.5 nM and 20 pM respectively. The ratio without showing the standard error is estimated that the average error is +/−5%. Because phage ELISAs required substantial binding of the mutant phagemid to its protein target to generate a measurable signal, non-binders (NB) could not be precisely quantitated but may be interpreted to have a greatly reduced binding affinity (greater than 1000 IC50 value). Asterick (*) indicated the alanine scanning data on hVEGF for Fab-12 and hVEGF receptors were from Muller et al., (1997) PNAS USA 94: 7192-7197 and Li et al., (2000) Cancer Res. 57:4593-4599.

[0089] FIGS. 20A and B describe results from the FabG6 and G6-23 heavy chain shotgun scan Fwt/mut values measured the effects of FabG6 and G6-23 heavy chain CDRs alanine (black bars) or homolog (white bars) substitutions on binding affinity for hVEGF. Shotgun scanning data for (A) FabG6 heavy chain were from FIG. 16A, and for (B) FabG6-23 heavy chain were from FIG. 16B.

[0090] FIGS. 21A and B describe results from the FabG6 and G6-23 light chain shotgun scan. Fwt/mut values measured the effects of FabG6 and G6-23 light chain CDRs alanine (black bars) or homolog (white bars) substitutions on binding affinity for hVEGF. Shotgun scanning data for (A) FabG6 light chain were from FIG. 17A, and for (B) FabG6-23 light chain were from FIG. 17B.

[0091] FIGS. 22A and B report the DDGAla-wt values for the FabG6 and G6-23 shotgun scan. DDGAla-wt values measuring the effects of (A) FabG6 and (B) FabG6-23 CDRs alanine substitutions on binding affinity for hVEGF were calculated using biophysical equation (DDGAla-wt=RTln(Ka,wt/Ka,Ala)=RTln(Fwt/Ala)) as previously described (Weiss et al., (2000) PNAS USA 97:8950-8954) and Fwt/Ala values were from FIGS. 16 and 17.

[0092] FIG. 23 describes the results of sensograms for injection of 100 nM Fab at 25° C. over hVEGF immobilized on BIAcore chip. It demonstrated the on-rate improvement for G6 variant with alanine substitution at position 58 of CDR-H2. Additional on-rate improvement also can be observed for this variant with valine substitution at position 51 of CDR-H2. This figure was generated using GraphPad Prism 4.0 version software (http://www.graphpad.com).

[0093] FIG. 24 shows the amino acid sequences of the G6 Fab light chain and the G6 Fab heavy chain, respectively. The underlines indicates residues in the CDR1-LC, CDR2-LC and CDR3-LC or CDR1-HC, CDR2-HC or CDR3-HC according to the Kabat numbering system.

[0094] FIG. 25 shows the amino acid sequence of the G6-23 Fab light chain and of the G6-23 Fab heavy chain as well as the amino acid sequences of the G6-31 and G6-8 Fab light chains. The underlines indicate the position of the CDRs according to the Kabat numbering system.

[0095] FIG. 26 shows the amino acid sequences the amino acid sequences of the G6-23.1 and G6-23.2 Fab light and heavy chains. The underlines indicate the position of the CDRs according to the Kabat numbering system.

[0096] FIG. 27 shows the amino acid sequence of the B20 Fab light and heavy chains. The underlines indicate the position of the CDRs according to the Kabat numbering system.

[0097] FIG. 28 shows a summary of high affinity binders of VEGF derived from a B20-based library.

[0098] FIG. 29 shows the amino acid sequence of the B20-4 and B20-4.1 Fab light and heavy chains.

[0099] FIG. 30 shows the affinity improvement of the anti-mVEGF Fab G6 by light chain randomization. (A) the sensograms for injection of 500 nM Fab at 37° C. over mVEGF immobilized BIAcore chip demonstrate the off rate and on rate improvements; (B) the observed rate (K_{obs}, s⁻¹) of complex formation between G6 and variant Fabs and mVEGF as the rate of the decrease of fluorescence intensity was plotted against the concentrations of mVEGF (nM) used and the slope based on the pseudo-first-order analysis was the on rate (×10⁹ M⁻¹ s⁻¹).

[0100] FIG. 31 shows that G6 can effectively block both hVEGF and mVEGF binding to Flt-1 receptor. Fab-12 and Y0317 were used as controls.

[0101] FIG. 32 shows on-rates, off-rates, Kd values and IC50 values for Fab protein-human VEGF or Fab protein-mouse VEGF interactions at 25° C. and 37° C. using surface plasmon resonance (SPR) methods with BIAcore or solution binding assays with competition ELISA or fluorescence quenching with Fab-12 and Y0317 as comparison. “NB” indicates non-binder. “ND” indicates not determined.

[0102] FIG. 33A-E shows the inhibition of HM7 tumor growth in nude mice after administration with the G6 antibody, the G6-31 antibody, the Y0317 antibody and the Avastin™ antibody at (A) 0.1 mg/kg dose twice weekly, (B) 0.25 mg/kg dose twice weekly, (C) 0.5 mg/kg dose twice weekly; (D) 2 mg/kg twice weekly and (E) 5 mg/kg dose twice weekly. An anti-ragweed antibody was used as a control.

[0103] FIG. 34 shows a summary of various G6 (A) light chain and (B) heavy chain variants based on sequence and IC50 analysis. The wild type IC50 reflects the mean of the values obtained in the different experiments. Varied amino acid positions are shown in bold. Residues differing from wild type G6 are highlighed. The residues are denoted by the single-letter amino acid code and a number denoting its position according to the scheme of Kabat et al., 1987

[0104] FIG. 35 shows a summary of various G6-23 (A) light chain and (B) heavy chain variants based on sequence and IC50 analysis. The wild type IC50 reflects the mean of the values obtained in the different experiments. Varied amino acid positions are shown in bold. Residues differing from wild type G6 are highlighed. The residues are denoted by the single-letter amino acid code and a number denoting its position according to the scheme of Kabat et al., 1987

[0105] FIG. 36 shows portions of the amino acid sequences of YADS-1, YADS-2 and YADS-3 antibodies and other clones. Represented are sequences of three hVEGF binders selected from the YADS-II library. Residues that were not randomized in the library are grey shaded.

[0106] FIG. 37 shows amino acid sequences of a group of YADS series antibodies. Represented are sequences of unique clones obtained from the sorting of library YADS-A against hVEGF. Residues that were not randomized in the library are grey shaded.

[0107] FIG. 38 shows amino acid sequences of a group of YADS series antibodies. Represented are sequences of unique clones obtained from the sorting of library YADS-B against hVEGF. Residues that were not randomized in the library are grey shaded.

[0108] FIG. 39 shows the Fab sequences of YADS2 and YADS3 antibodies. Bolded portions indicate variable region residies. Underlined portions indicate approximate residues of CDR-L1, CDR-L2, CDR-L3, CDR-H1, CDR-H2 or CDR-H3.

[0109] FIG. 40 shows NNK variants of the YADS2 antibody. “x” indicates a STOP codon or an unreadable sequence.

[0110] FIG. 41 shows amino acid sequences of a group of YS series antibodies. They represent sequences of binders obtained from selection of library YS-A and YS-B.

[0111] FIG. 42 shows CDR sequences from anti-VEGF antibodies of the YS libraries. Clones 1-52 were selected from library B, while clones 53-63 were selected from library A. From left to right, columns 1-5 of CDR-L3 refer to positions 91, 92, 93, 94 and 96, respectively; columns 1-5 of CDR-H1 refer to positions 28, 30, 31, 32, and 33; columns 1-6 of CDR-R2 refer to positions 50, 52, 53, 54, 56 and 58; and columns 1-15 of CDR-H3 refer to positions 95, 96, 97, 98, 99, 100 and 100a-i according to Kabat numbering.

[0112] FIG. 43 shows the sequence of the YS1 Fab. Portions in bold indicate residues in the variable region.

### DETAILED DESCRIPTION OF THE PREFERRED EMBODIMENTS

I. Definitions

[0113] The term “antibody” is used in the broadest sense and specifically covers monoclonal antibodies (including full length monoclonal antibodies), polyclonal antibodies, multispecific antibodies (e.g., bispecific antibodies), and antibody fragments so long as they exhibit the desired biological activity. A “G6 series polypeptide” according to this invention is a polypeptide, including an antibody according to this invention, that is derived from a sequence of a G6 antibody or G6-derived antibody according to any one of FIGS. 7, 24-26 and 34-35 and binds to human VEGF with a desired affinity according to this invention (e.g., 10 nm or less, 2 nM or less, 1 nM or less, 0.1 nM or less, 500 pM or less for the Fab version of the antibody at 25° C.). A “B20 series polypeptide” according to this invention is a polypeptide, including an antibody according to this invention, that is derived from a sequence of the B20 antibody or a B20-derived antibody according to any one of FIGS. 27-29 and binds to VEGF with a desired affinity according to this invention. A “YADS series polypeptide” or “YADS polypeptide” according to this invention is a polypeptide, including an antibody according to this invention, that is derived from a sequence of the YADS antibody according to any one of FIGS. 36-40 and binds to VEGF with a desired affinity according to this invention. A “YADS-2 series polypeptide” or “YADS2 polypeptide” according to this invention is a polypeptide, including an antibody according to this invention, that is derived from a sequence of the YADS2 antibody according to FIG. 36 or FIG. 39 and binds to VEGF with a desired affinity according to this invention. A “YADS-3 series polypeptide” or “YADS3 polypeptide” according to this invention is a polypeptide, including an antibody according to this invention, that is derived from a sequence of the YADS3 antibody according to FIG. 36 or FIG. 39 and binds to VEGF with a desired affinity according to this invention. “YS series polypeptide” or “YS polypeptide” according to this invention is a polypeptide, including an antibody according to this invention, that is derived from a sequence of a YS antibody according to FIG. 41-43 and binds to VEGF with a desired affinity according to this invention. According to one preferred embodiment, the G series polypeptide, B20 series polypeptide, the YADS series polypeptide, the YADS2 series polypeptide, the YADS3 series polypeptide or the YS series polypeptide binds to human and a non-human mammalian VEGF with a Kd value that is within 10 fold of each other. According to one embodiment, the kD values for those antibodies binding to human VEGF and a mouse VEGF are 10 nM or less. In another embodiment, the antibodies bind to human VEGF and mouse VEGF with Kd values of 2 nM or less. In another embodiment, the antibodies bind to human VEGF with Kd values of 1 nM or less. The affinities of such G6 series, B20 series, YADS and YS series polypeptides for VEGF can be improved by methods, e.g., such as the phage display techniques taught herein.

[0114] As used herein, “antibody variable domain” refers to the portions of the light and heavy chains of antibody molecules that include amino acid sequences of Complementarity Determining Regions (CDRs; ie., CDR1, CDR2, and CDR3), and Framework Regions (FRs). V_{H} refers to the variable domain of the heavy chain. V_{L} refers to the variable domain of the light chain. According to the methods used in this invention, the amino acid positions assigned to CDRs and FRs may be defined according to Kabat (Sequences of Proteins of Immunological Interest (National Institutes of Health, Bethesda, Md., 1987 and 1991)). Amino acid numbering of antibodies or antigen binding fragments is also according to that of Kabat.

[0115] As used herein, the term “Complementarity Determining Regions (CDRs; ie., CDR1, CDR2, and CDR3) refers to the amino acid residues of an antibody variable domain the presence of which are necessary for antigen binding. Each variable domain typically has three CDR regions identified as CDR1, CDR2 and CDR3. Each complementarity determining region may comprise amino acid residues from a “complementarity determining region” as defined by Kabat (i.e. about residues 24-34 (L1), 50-56 (L2) and 89-97 (L3) in the light chain variable domain and 31-35 (H1), 50-65 (H2) and 95-102 (H3) in the heavy chain variable domain; Kabat et al, Sequences of Proteins of Immunological Interest, 5th Ed. Public Health Service, National Institutes of Health, Bethesda, Md. (1991)) and/or those residues from a “hypervariable loop” (i.e. about residues 26-32 (L1), 50-52 (L2) and 91-96 (L3) in the light chain variable domain and 26-32 (H1), 53-55 (H2) and 96-101 (H3) in the heavy chain variable domain; Chothia and Lesk J. Mol. Biol. 196:901-917 (1987)). In some instances, a complementarity determining region can include amino acids from both a CDR region defined according to Kabat and a hypervariable loop. For example, the CDRH1 of the heavy chain of antibody 4D5 includes amino acids 26 to 35.

[0116] “Framework regions” (hereinafter FR) are those variable domain residues other than the CDR residues. Each variable domain typically has four FRs identified as FR1, FR2, FR3 and FR4. If the CDRs are defined according to Kabat, the light chain FR residues are positioned at about residues 1-23 (LCFR1), 35-49 (LCFR2), 57-88 (LCFR3), and 98-107 (LCFR4) and the heavy chain FR residues are positioned about at residues 1-30 (HCFR1), 36-49 (HCFR2), 66-94 (HCFR3), and 103-113 (HCFR4) in the heavy chain residues. If the CDRs comprise amino acid residues from hypervariable loops, the light chain FR residues are positioned about at residues 1-25 (LCFR1), 33-49 (LCFR2), 53-90 (LCFR3), and 97-107 (LCFR4) in the light chain and the heavy chain FR residues are positioned about at residues 1-25 (HCFR1), 33-52 (HCFR2), 56-95 (HCFR3), and 102-113 (HCFR4) in the heavy chain residues. In some instances, when the CDR comprises amino acids from both a CDR as defined by Kabat and those of a hypervariable loop, the FR residues will be adjusted accordingly. For example, when CDRH1 includes amino acids H26-H35, the heavy chain FR1 residues are at positions 1-25 and the FR2 residues are at positions 36-49.

[0117] As used herein, “codon set” refers to a set of different nucleotide triplet sequences used to encode desired variant amino acids. A set of oligonucleotides can be synthesized, for example, by solid phase synthesis, including sequences that represent all possible combinations of nucleotide triplets provided by the codon set and that will encode the desired group of amino acids. A standard form of codon designation is that of the IUB code, which is known in the art and described herein. A codon set typically is represented by 3 capital letters in italics, eg. NNK, NNS, XYZ DVK and the like. A “non-random codon set”, as used herein, thus refers to a codon set that encodes select amino acids that fulfill partially, preferably completely, the criteria for amino acid selection as described herein. Synthesis of oligonucleotides with selected nucleotide “degeneracy” at certain positions is well known in that art, for example the TRIM approach (Knappek et al.; J. Mol. Biol. (1999), 296:57-86); Garrard & Henner, Gene (1993), 128:103). Such sets of oligonucleotides having certain codon sets can be synthesized using commercial nucleic acid synthesizers (available from, for example, Applied Biosystems, Foster City, Calif.), or can be obtained commercially (for example, from Life Technologies, Rockville, Md.). Therefore, a set of oligonucleotides synthesized having a particular codon set will typically include a plurality of oligonucleotides with different sequences, the differences established by the codon set within the overall sequence. Oligonucleotides, as used according to the invention, have sequences that allow for hybridization to a variable domain nucleic acid template and also can, but does not necessarily, include restriction enzyme sites useful for, for example, cloning purposes.

[0118] An “Fv” fragment is an antibody fragment which contains a complete antigen recognition and binding site. This region consists of a dimer of one heavy and one light chain variable domain in tight association, which can be covalent in nature, for example in scFv. It is in this configuration that the three CDRs of each variable domain interact to define an antigen binding site on the surface of the V_{H}-V_{L} dimer. Collectively, the six CDRs or a subset thereof confer antigen binding specificity to the antibody. However, even a single variable domain (or half of an Fv comprising only three CDRs specific for an antigen) has the ability to recognize and bind antigen, although usually at a lower affinity than the entire binding site.

[0119] The “Fab” fragment contains a variable and constant domain of the light chain and a variable domain and the first constant domain (CH1) of the heavy chain. F(ab′)₂ antibody fragments comprise a pair of Fab fragments which are generally covalently linked near their carboxy termini by hinge cysteines between them. Other chemical couplings of antibody fragments are also known in the art.

[0120] “Single-chain Fv” or “scFv” antibody fragments comprise the V_{H} and V_{L} domains of antibody, wherein these domains are present in a single polypeptide chain. Generally the Fv polypeptide further comprises a polypeptide linker between the V_{H} and V_{L} domains, which enables the scFv to form the desired structure for antigen binding. For a review of scFv, see Pluckthun in The Pharmacology of Monoclonal Antibodies, Vol 113, Rosenburg and Moore eds. Springer-Verlag, New York, pp. 269-315 (1994).

[0121] The term “diabodies” refers to small antibody fragments with two antigen-binding sites, which fragments comprise a heavy chain variable domain (V_{H}) connected to a light chain variable domain (V_{L}) in the same polypeptide chain (V_{H} and V_{L}). By using a linker that is too short to allow pairing between the two domains on the same chain, the domains are forced to pair with the complementary domains of another chain and create two antigen-binding sites. Diabodies are described more fully in, for example, EP 404,097; WO 93/11161; and Hollinger et al., Proc. Natl. Acad. Sci. USA, 90:6444-6448 (1993).

[0122] The expression “linear antibodies” refers to the antibodies described in Zapata et al., Protein Eng., 8(10):1057-1062 (1995). Briefly, these antibodies comprise a pair of tandem Fd segments (V_{H}-C_{H}1-V_{H}-C_{H}1) which, together with complementary light chain polypeptides, form a pair of antigen binding regions. Linear antibodies can be bispecific or monospecific.

[0123] The term “monoclonal antibody” as used herein refers to an antibody obtained from a population of substantially homogeneous antibodies, i.e., the individual antibodies comprising the population are identical except for possible naturally occurring mutations that may be present in minor amounts. Monoclonal antibodies are highly specific, being directed against a single antigenic site. Furthermore, in contrast to conventional (polyclonal) antibody preparations which typically include different antibodies directed against different determinants (epitopes), each monoclonal antibody is directed against a single determinant on the antigen. The modifier “monoclonal” indicates the character of the antibody as being obtained from a substantially homogeneous population of antibodies, and is not to be construed as requiring production of the antibody by any particular method. For example, the monoclonal antibodies to be used in accordance with the present invention may be made by the hybridoma method first described by Kohler et al., Nature 256:495 (1975), or may be made by recombinant DNA methods (see, e.g., U.S. Pat. No. 4,816,567). The “monoclonal antibodies” may also be isolated from phage antibody libraries using the techniques described in Clackson et al., Nature 352:624-628 (1991) and Marks et al., J. Mol. Biol. 222:581-597 (1991), for example.

[0124] The monoclonal antibodies herein specifically include “chimeric” antibodies (immunoglobulins) in which a portion of the heavy and/or light chain is identical with or homologous to corresponding sequences in antibodies derived from a particular species or belonging to a particular antibody class or subclass, while the remainder of the chain(s) is identical with or homologous to corresponding sequences in antibodies derived from another species or belonging to another antibody class or subclass, as well as fragments of such antibodies, so long as they exhibit the desired biological activity (U.S. Pat. No. 4,816,567; and Morrison et al., Proc. Natl. Acad. Sci. USA 81:6851-6855 (1984)).

[0125] “Humanized” forms of non-human (e.g., murine) antibodies are chimeric antibodies which contain minimal sequence derived from nonhuman immunoglobulin. For the most part, humanized antibodies are human immunoglobulins (recipient antibody) in which residues from a hypervariable region of the recipient are replaced by residues from a hypervariable region of a non-human species (donor antibody) such as mouse, rat, rabbit or nonhuman primate having the desired specificity, affinity, and capacity. In some instances, Fv framework region (FR) residues of the human immunoglobulin are replaced by corresponding non-human residues. Furthermore, humanized antibodies may comprise residues which are not found in the recipient antibody or in the donor antibody. These modifications are made to further refine antibody performance. In general, the humanized antibody will comprise substantially all of at least one, and typically two, variable domains, in which all or substantially all of the hypervariable loops correspond to those of a non-human immunoglobulin and all or substantially all of the FR regions are those of a human immunoglobulin sequence. The humanized antibody optionally also will comprise at least a portion of an immunoglobulin constant region (Fc), typically that of a human immunoglobulin. For further details, see Jones et al., Nature 321:522-525 (1986); Riechmann et al., Nature 332:323-329 (1988); and Presta, Curr. Op. Struct. Biol. 2:593-596 (1992).

[0126] A “species-dependent antibody” is one which has a stronger binding affinity for an antigen from a first mammalian species than it has for a homologue of that antigen from a second mammalian species. Normally, the species-dependent antibody “binds specifically” to a human antigen (i.e. has a binding affinity (K_{d}) value of no more than about 1×10⁻⁻⁷ M, preferably no more than about 1×10⁻⁻⁸ M and most preferably no more than about 1×10⁻⁹ M) but has a binding affinity for a homologue of the antigen from a second nonhuman mammalian species which is at least about 50 fold, or at least about 500 fold, or at least about 1000 fold, weaker than its binding affinity for the human antigen. The species-dependent antibody can be any of the various types of antibodies as defined above, but preferably is a humanized or human antibody.

[0127] As used herein, “antibody mutant” or “antibody variant” refers to an amino acid sequence variant of the species-dependent antibody wherein one or more of the amino acid residues of the species-dependent antibody have been modified. Such mutants necessarily have less than 100% sequence identity or similarity with the species-dependent antibody. In a preferred embodiment, the antibody mutant will have an amino acid sequence having at least 75% amino acid sequence identity or similarity with the amino acid sequence of either the heavy or light chain variable domain of the species-dependent antibody, more preferably at least 80%, more preferably at least 85%, more preferably at least 90%, and most preferably at least 95%. Identity or similarity with respect to this sequence is defined herein as the percentage of amino acid residues in the candidate sequence that are identical (i.e. same residue) or similar (i.e. amino acid residue from the same group based on common side-chain properties, see below) with the species-dependent antibody residues, after aligning the sequences and introducing gaps, if necessary, to achieve the maximum percent sequence identity. None of N-terminal, C-terminal, or internal extensions, deletions, or insertions into the antibody sequence outside of the variable domain shall be construed as affecting sequence identity or similarity.

[0128] To increase the half-life of the antibodies or polypeptide containing the amino acid sequences of this invention, one can attach a salvage receptor binding epitope to the antibody (especially an antibody fragment), as described, e.g., in U.S. Pat. No. 5,739,277. For example, a nucleic acid molecule encoding the salvage receptor binding epitope can be linked in frame to a nucleic acid encoding a polypeptide sequence of this invention so that the fusion protein expressed by the engineered nucleic acid molecule comprises the salvage receptor binding epitope and a polypeptide sequence of this invention. As used herein, the term salvage receptor binding epitope” refers to an epitope of the Fc region of an IgG molecule (e.g., IgG₁, IgG₂, IgG₃, or IgG₄) that is responsible for increasing the in vivo serum half-life of the IgG molecule (e.g., Ghetie, V et al., (2000) Ann. Rev. Immunol. 18:739-766, Table 1). Antibodies with substitutions in an Fc region thereof and increased serum half-lives are also described in WO00/42072 (Presta, L.), WO 02/060919; Shields, R. L., et al., (2001) JBC 276(9):6591-6604; Hinton, P. R, (2004) JBC 279(8):6213-6216). In another embodiment, the serum half-life can also be increased, for example, by attaching other polypeptide sequences. For example, antibodies of this invention or other polypeptide containing the amino acid sequences of this invention can be attached to serum albumin or a portion of serum albumin that binds to the FcRn receptor or a serum albumin binding peptide so that serum albumin binds to the antibody or polypeptide, e.g., such polypeptide sequences are disclosed in WO01/45746. In one preferred embodiment, the serum albumin peptide to be attached comprises an amino acid sequence of DICLPRWGCLW. In another embodiment, the half-life of a Fab according to this invention is increased by these methods. See also, Dennis, M. S., et al., (2002) JBC 277(38):35035-35043 for serum albumin binding peptide sequences.

[0129] An “isolated” antibody is one which has been identified and separated and/or recovered from a component of its natural environment. Contaminant components of its natural environment are materials which would interfere with diagnostic or therapeutic uses for the antibody, and may include enzymes, hormones, and other proteinaceous or nonproteinaceous solutes. In preferred embodiments, the antibody will be purified (1) to greater than 95% by weight of antibody as determined by the Lowry method, and most preferably more than 99% by weight, (2) to a degree sufficient to obtain at least 15 residues of N-terminal or internal amino acid sequence by use of a spinning cup sequenator, or (3) to homogeneity by SDS-PAGE under reducing or nonreducing conditions using Coomassie blue or, preferably, silver stain. Isolated antibody includes the antibody in situ within recombinant cells since at least one component of the antibody's natural environment will not be present. Ordinarily, however, isolated antibody will be prepared by at least one purification step.

[0130] An “angiogenic factor or agent” is a growth factor which stimulates the development of blood vessels, e.g., promote angiogenesis, endothelial cell growth, stability of blood vessels, and/or vasculogenesis, etc. For example, angiogenic factors, include, but are not limited to, e.g., VEGF and members of the VEGF family, PIGF, PDGF family, fibroblast growth factor family (FGFs), TIE ligands (Angiopoietins), ephrins, Del-1, fibroblast growth factors: acidic (aFGF) and basic (bFGF), Follistatin, Granulocyte colony-stimulating factor (G-CSF), Hepatocyte growth factor (HGF)/scatter factor (SF), Interleukin-8 (IL-8), Leptin, Midkine, Placental growth factor, Platelet-derived endothelial cell growth factor (PD-ECGF), Platelet-derived growth factor, especially PDGF-BB or PDGFR-beta, Pleiotrophin (PTN), Progranulin, Proliferin, Transforming growth factor-alpha (TGF-alpha), Transforming growth factor-beta (TGF-beta), Tumor necrosis factor-alpha (TNF-alpha), Vascular endothelial growth factor (VEGF)/vascular permeability factor (VPF), etc. It would also include factors that accelerate wound healing, such as growth hormone, insulin-like growth factor-I (IGF-I), VIGF, epidermal growth factor (EGF), CTGF and members of its family, and TGF-alpha and TGF-beta. See, e.g., Klagsbrun and D'Amore, Annu. Rev. Physiol., 53:217-39 (1991); Streit and Detmar, Oncogene, 22:3172-3179 (2003); Ferrara & Alitalo, Nature Medicine 5(12): 1359-1364 (1999); Tonini et al., Oncogene, 22:6549-6556 (2003) (e.g., Table 1 listing known angiogenic factors); and, Sato Int. J. Clin. Oncol., 8:200-206 (2003).

[0131] An “anti-angiogenesis agent” or “angiogenesis inhibitor” refers to a small molecular weight substance, an polynucleotide, an polypeptide, an isolated protein, a recombinant protein, an antibody, or conjugates or fusion proteins thereof, that inhibits angiogenesis, vasculogenesis, or undesirable vascular permeability, either directly or indirectly. It should be understood that the anti-angiogenesis agent includes those agents that bind and block the angiogenic activity of the angiogenic factor or its receptor. For example, an anti-angiogenesis agent is an antibody or other antagonist to an angiogenic agent as defined above, e.g., antibodies to VEGF-A or to the VEGF-A receptor (e.g., KDR receptor or Flt-1 receptor), anti-PDGFR inhibitors such as Gleevec™ (Imatinib Mesylate). Anti-angiogensis agents also include native angiogenesis inhibitors, e.g., angiostatin, endostatin, etc. See, e.g., Klagsbrun and D'Amore, Annu. Rev. Physiol., 53:217-39 (1991); Streit and Detmar, Oncogene, 22:3172-3179 (2003) (e.g., Table 3 listing anti-angiogenic therapy in malignant melanoma); Ferrara & Alitalo, Nature Medicine 5(12):1359-1364 (1999); Tonini et al., Oncogene, 22:6549-6556 (2003) (e.g., Table 2 listing known antiangiogenic factors); and, Sato Int. J. Clin. Oncol., 8:200-206 (2003) (e.g., Table 1 lists anti-angiogenic agents used in clinical trials).

[0132] The “Kd” or “Kd value” according to this invention is in one preferred embodiment measured by a radiolabeled VEGF binding assay (RIA) performed with the Fab version of the antibody and a VEGF molecule as described by the following assay that measures solution binding affinity of Fabs for VEGF by equilibrating Fab with a minimal concentration of (¹²⁵I)-labeled VEGF(109) in the presence of a titration series of unlabeled VEGF, then capturing bound VEGF with an anti-Fab antibody-coated plate (Chen, et al., (1999) J. Mol Biol 293:865-881). To establish conditions for the assay, microfiter plates (Dynex) are coated overnight with 5 ug/ml of a capturing anti-Fab antibody (Cappel Labs) in 50 mM sodium carbonate (pH 9.6), and subsequently blocked with 2% (w/v) bovine serum albumin in PBS for two to five hours at room temperature (approximately 23° C.). In a non-adsorbant plate (Nunc #269620), 100 pM or 26 pM [¹²⁵I ]VEGF(109) are mixed with serial dilutions of a Fab of interest, e.g., Fab-12 (Presta et al., (1997) Cancer Res. 57:4593-4599). The Fab of interest is then incubated overnight; however, the incubation may continue for 65 hours to insure that equilibrium is reached. Thereafter, the mixtures are transferred to the capture plate for incubation at room temperature for one hour. The solution is then removed and the plate washed eight times with 0.1% Tween-20 in PBS. When the plates had dried, 150 ul/well of scintillant (MicroScint-20; Packard) is added, and the plates are counted on a Topcount gamma counter (Packard) for ten minutes. Concentrations of each Fab that give less than or equal to 20% of maximal binding are chosen for use in competitive binding assays. According to another embodiment the Kd or Kd value is measured by using surface plasmon resonance assays using a BIAcore™-2000 or a BIAcore™-3000 (BIAcore, Inc., Piscataway, N.J.) at 25° C. with immobilized hVEGF (8-109) CM5 chips at ˜10 response units (RU). Briefly, carboxymethylated dextran biosensor chips (CM5, BIAcore Inc.) are activated with N-ethyl-N′-(3-dimethylaminopropyl)-carbodiimide hydrochloride (EDC) and N-hydroxysuccinimide (NHS) according to the supplier's instructions. Human VEGF is diluted with 10 mM sodium acetate, pH 4.8, into 5 ug/ml (˜0.2 uM) before injection at a flow rate of 5 ul/minute to achieve approximately 10 response units (RU) of coupled protein. Following the injection of human VEGF, 1M ethanolamine is injected to block unreacted groups. For kinetics measurements, two-fold serial dilutions of Fab (0.78 nM to 500 nM) are injected in PBS with 0.05% Tween 20 (PBST) at 25° C. at a flow rate of approximately 25 ul/min. Association rates (kₒₙ) and dissociation rates (k_{off}) are calculated using a simple one-to-one Langmuir binding model (BIAcore Evaluation Software version 3.2) by simultaneous fitting the association and dissociation sensorgram. The equilibrium dissociation constant (Kd) was calculated as the ratio k_{off}/kₒₙ. See, e.g., Chen, Y., et al., (1999) J. Mol Biol 293:865-881. If the on-rate exceeds 10⁶ M⁻¹ S⁻¹ by the surface plasmon resonance assay above, then the on-rate is can be determined by using a fluorescent quenching technique that measures the increase or decrease in fluorescence emission intensity (excitation=295 nm; emission=340 nm, 16 nm band-pass) at 25° C. of a 20 nM anti-VEGF antibody (Fab form) in PBS, pH 7.2, in the presence of increasing concentrations of human VEGF short form (8-109) or mouse VEGF as measured in a spectrometer, such as a stop-flow equipped spectrophometer (Aviv Instruments) or a 8000-series SLM-Aminco spectrophotometer (ThermoSpectronic) with a stirred cuvette.

[0133] An “on-rate” or “rate of association” or “association rate” or “kₒₙ” according to this invention is preferably determined with same surface plasmon resonance technique described above using a BIAcore™-2000 or a BIAcore™-3000 (BIAcore, Inc., Piscataway, N.J.) at 25° C. with immobilized hVEGF (8-109) CM5 chips at ˜10 response units (RU). Briefly, carboxymethylated dextran biosensor chips (CM5, BIAcore Inc.) are activated with N-ethyl-N′-(3-dimethylaminopropyl)-carbodiimide hydrochloride (EDC) and N-hydroxysuccinimide (NHS) according to the supplier's instructions. Human VEGF is diluted with 10 mM sodium acetate, pH 4.8, into 5 ug/ml (˜0.2 uM) before injection at a flow rate of 5 ul/minute to achieve approximately 10 response units (RU) of coupled protein. Following the injection of 1M ethanolamine to block unreacted groups. For kinetics measurements, two-fold serial dilutions of Fab (0.78 nM to 500 nM) are injected in PBS with 0.05% Tween 20 (PBST) at 25° C. at a flow rate of approximately 25 ul/min. Association rates (kₒₙ) and dissociation rates (k_{off}) are calculated using a simple one-to-one Langmuir binding model (BIAcore Evaluation Software version 3.2) by simultaneous fitting the association and dissociation sensorgram. The equilibrium dissociation constant (Kd) was calculated as the ratio k_{off}/kₒₙ. See, e.g., Chen, Y., et al., (1999) J. Mol Biol 293:865-881. However, if the on-rate exceeds 10⁶ M⁻¹ S⁻¹ by the surface plasmon resonance assay above, then the on-rate is preferably determined by using a fluorescent quenching technique that measures the increase or decrease in fluorescence emission intensity (excitation=295 nm; emission=340 nm, 16 nm band-pass) at 25° C. of a 20 nM anti-VEGF antibody (Fab form) in PBS, pH 7.2, in the presence of increasing concentrations of human short form (8-109) or mouse VEGF as measured in a a spectrometer, such as a stop-flow equipped spectrophometer (Aviv Instruments) or a 8000-series SLM-Aminco spectrophotometer (ThermoSpectronic) with a stirred cuvette.

[0134] A “functional epitope” according to this invention refers to amino acid residues of an antigen that contribute energetically to the binding of an antibody. Mutation of any one of the energetically contributing residues of the antigen (for example, mutation of wild-type VEGF by alanine or homolog mutation) will disrupt the binding of the antibody such that the relative affinity ratio (IC50mutant VEGF/IC50wild-type VEGF) of the antibody will be greater than 5 (see Example 2). In a preferred embodiment, the relative affinity ratio is determined by a solution binding phage displaying ELISA. Briefly, 96-well Maxisorp immunoplates (NUNC) are coated overnight at 4° C. with an Fab form of the antibody to be tested at a concentration of 2 ug/ml in PBS, and blocked with PBS, 0.5% BSA, and 0.05% Tween20 (PBT) for 2 h at room temperature. Serial dilutions of phage displaying hVEGF alanine point mutants (residues 8-109 form) or wild type hVEGF (8-109) in PBT are first incubated on the Fab-coated plates for 15 min at room temperature, and the plates are washed with PBS, 0.05% Tween20(PBST). The bound phage is detected with an anti-M13 monoclonal antibody horseradish peroxidase (Amersham Pharmacia) conjugate diluted 1:5000 in PBT, developed with 3,3′, 5,5′-tetramethylbenzidine (TMB, Kirkegaard & Perry Labs, Gaithersburg, Md.) substrate for approximately 5 min, quenched with 1.0 M H₃PO₄, and read spectrophotometrically at 450 nm. The ratio of IC50 values (IC50,ala/IC50,wt) represents the fold of reduction in binding affinity (the relative binding affinity).

[0135] For competitive binding assays, Maxisorb plates are coated and blocked as above, and serial threefold dilutions of unlabeled VEGF(109) are made in PBS/Tween buffer in a Nunc plate. [¹²⁵I]VEGF(109) is added, followed by addition of a fixed concentration of the Fab of interest. The final concentrations of the Fab of interest are 100 pM and 10 pM, respectively. After incubation (as above), bound VEGF is captured and quantified as described above. The binding data is analyzed using a computer program to perform Scatchard analysis (P. Munson et al., (1980) Anal. Biochem. (1980) 107:220-239) for determination of the dissociation binding constants, K_{d}.

[0136] As used herein, “library” refers to a plurality of antibody or antibody fragment sequences (for example, polypeptides of the invention), or the nucleic acids that encode these sequences, the sequences being different in the combination of variant amino acids that are introduced into these sequences according to the methods of the invention.

[0137] “Phage display” is a technique by which variant polypeptides are displayed as fusion proteins to at least a portion of coat protein on the surface of phage, e.g., filamentous phage, particles. A utility of phage display lies in the fact that large libraries of randomized protein variants can be rapidly and efficiently sorted for those sequences that bind to a target antigen with high affinity. Display of peptide and protein libraries on phage has been used for screening millions of polypeptides for ones with specific binding properties. Polyvalent phage display methods have been used for displaying small random peptides and small proteins through fusions to either gene III or gene VIII of filamentous phage. Wells and Lowman, Curr. Opin. Struct. Biol., 3:355-362 (1992), and references cited therein. In a monovalent phage display, a protein or peptide library is fused to a gene III or a portion thereof, and expressed at low levels in the presence of wild type gene III protein so that phage particles display one copy or none of the fusion proteins. Avidity effects are reduced relative to polyvalent phage so that sorting is on the basis of intrinsic ligand affinity, and phagemid vectors are used, which simplify DNA manipulations. Lowman and Wells, Methods: A companion to Methods in Enzymology, 3:205-0216 (1991).

[0138] A “phagemid” is a plasmid vector having a bacterial origin of replication, e.g., ColE1, and a copy of an intergenic region of a bacteriophage. The phagemid may be used on any known bacteriophage, including filamentous bacteriophage and lambdoid bacteriophage. The plasmid will also generally contain a selectable marker for antibiotic resistance. Segments of DNA cloned into these vectors can be propagated as plasmids. When cells harboring these vectors are provided with all genes necessary for the production of phage particles, the mode of replication of the plasmid changes to rolling circle replication to generate copies of one strand of the plasmid DNA and package phage particles. The phagemid may form infectious or non-infectious phage particles. This term includes phagemids which contain a phage coat protein gene or fragment thereof linked to a heterologous polypeptide gene as a gene fusion such that the heterologous polypeptide is displayed on the surface of the phage particle.

[0139] The term “phage vector” means a double stranded replicative form of a bacteriophage containing a heterologous gene and capable of replication. The phage vector has a phage origin of replication allowing phage replication and phage particle formation. The phage is preferably a filamentous bacteriophage, such as an M13, fl, fd, Pf3 phage or a derivative thereof, or a lambdoid phage, such as lambda, 21, phi80, phi81, 82, 424, 434, etc., or a derivative thereof.

[0140] As used herein, “solvent accessible position” refers to a position of an amino acid residue in the variable regions of the heavy and light chains of a source antibody or antigen binding fragment that is determined, based on structure, ensemble of structures and/or modeled structure of the antibody or antigen binding fragment, as potentially available for solvent access and/or contact with a molecule, such as an antibody-specific antigen. These positions are typically found in the CDRs and on the exterior of the protein. The solvent accessible positions of an antibody or antigen binding fragment, as defined herein, can be determined using any of a number of algorithms known in the art. Preferably, solvent accessible positions are determined using coordinates from a 3-dimensional model of an antibody, preferably using a computer program such as the InsightII program (Accelrys, San Diego, Calif.). Solvent accessible positions can also be determined using algorithms known in the art (e.g., Lee and Richards, J. Mol. Biol. 55, 379 (1971) and Connolly, J. Appl. Cryst. 16, 548 (1983)). Determination of solvent accessible positions can be performed using software suitable for protein modeling and 3-dimensional structural information obtained from an antibody. Software that can be utilized for these purposes includes SYBYL Biopolymer Module software (Tripos Associates). Generally and preferably, where an algorithm (program) requires a user input size parameter, the “size” of a probe which is used in the calculation is set at about 1.4 Angstrom or smaller in radius. In addition, determination of solvent accessible regions and area methods using software for personal computers has been described by Pacios ((1994) “ARVOMOL/CONTOUR: molecular surface areas and volumes on Personal Computers.” Comput. Chem. 18(4): 377-386; and (1995). “Variations of Surface Areas and Volumes in Distinct Molecular Surfaces of Biomolecules.” J. Mol. Model. 1: 46-53.)

[0141] “Treatment” refers to both therapeutic treatment and prophylactic or preventative measures. Those in need of treatment include those already with the disorder as well as those in which the disorder is to be prevented.

[0142] A “disorder” is any condition that would benefit from treatment with the antibody. For example, mammals who suffer from or need prophylaxis against abnormal angiogenesis (excessive, inappropriate or uncontrolled angiogenesis) or vascular permeability. This includes chronic and acute disorders or diseases including those pathological conditions which predispose the mammal to the disorder in question. Non-limiting examples of disorders to be treated herein include malignant and benign tumors; non-leukemias and lymphoid malignancies; neuronal, glial, astrocytal, hypothalamic and other glandular, macrophagal, epithelial, stromal and blastocoelic disorders; and inflammatory, angiogenic and immunologic disorders.

[0143] The term abnormal angiogenesis occurs when new blood vessels either grow excessively, insufficiently or inappropriately (e.g., the location, timing or onset of the angiogenesis being undesired from a medical standpoint) in a diseased state or such that it causes a diseased state. Excessive, inappropriate or uncontrolled angiogenesis occurs when there is new blood vessel growth that contributes to the worsening of the diseased state or causes a diseased state, such as in cancer, especially vascularized solid tumors and metastatic tumors (including colon, lung cancer (especially small-cell lung cancer), or prostate cancer), diseases caused by ocular neovascularisation, especially diabetic blindness, retinopathies, primarily diabetic retinopathy or age-induced macular degeneration and rubeosis; psoriasis, psoriatic arthritis, haemangioblastoma such as haemangioma; inflammatory renal diseases, such as glomerulonephritis, especially mesangioproliferative glomerulonephritis, haemolytic uremic syndrome, diabetic nephropathy or hypertensive nephrosclerosis; various inflammatory diseases, such as arthritis, especially rheumatoid arthritis, inflammatory bowel disease, psorasis, sarcoidosis, arterial arteriosclerosis and diseases occurring after transplants, endometriosis or chronic asthma and more than 70 other conditions. The new blood vessels can feed the diseased tissues, destroy normal tissues, and in the case of cancer, the new vessels can allow tumor cells to escape into the circulation and lodge in other organs (tumor metastases). Insufficient angiogenesis occurs when there is inadequate blood vessels growth that contributes to the worsening of a diseased state, e.g., in diseases such as coronary artery disease, stroke, and delayed wound healing. Further, ulcers, strokes, and heart attacks can result from the absence of angiogenesis that normally required for natural healing. The present invention contemplates treating those patients that are at risk of developing the above-mentioned illnesses.

[0144] Other patients that are candidates for receiving the antibodies or polypeptides of this invention have, or are at risk for developing, abnormal proliferation of fibrovascular tissue, acne rosacea, acquired immune deficiency syndrome, artery occlusion, atopic keratitis, bacterial ulcers, Bechets disease, blood borne tumors, carotid obstructive disease, choroidal neovascularization, chronic inflammation, chronic retinal detachment, chronic uveitis, chronic vitritis, contact lens overwear, corneal graft rejection, corneal neovascularization, corneal graft neovascularization, Crohn's disease, Eales disease, epidemic keratoconjunctivitis, fungal ulcers, Herpes simplex infections, Herpes zoster infections, hyperviscosity syndromes, Kaposi's sarcoma, leukemia, lipid degeneration, Lyme's disease, marginal keratolysis, Mooren ulcer, Mycobacteria infections other than leprosy, myopia, ocular neovascular disease, optic pits, Osler-Weber syndrome (Osler-Weber-Rendu, osteoarthritis, Pagets disease, pars planitis, pemphigoid, phylectenulosis, polyarteritis, post-laser complications, protozoan infections, pseudoxanthoma elasticum, pterygium keratitis sicca, radial keratotomy, retinal neovascularization, retinopathy of prematurity, retrolental fibroplasias, sarcoid, scleritis, sickle cell anemia, Sogrens syndrome, solid tumors, Stargarts disease, Steven's Johnson disease, superior limbic keratitis, syphilis, systemic lupus, Terrien's marginal degeneration, toxoplasmosis, trauma, tumors of Ewing sarcoma, tumors of neuroblastoma, tumors of osteosarcoma, tumors of retinoblastoma, tumors of rhabdomyosarcoma, ulcerative colitis, vein occlusion, Vitamin A deficiency and Wegeners sarcoidosis, undesired angiogenesis associated with diabetes, parasitic diseases, abnormal wound healing, hypertrophy following surgery, injury or trauma, inhibition of hair growth, inhibition of ovulation and corpus luteum formation, inhibition of implantation and inhibition of embryo development in the uterus.

[0145] Anti-angiogenesis therapies are useful in the general treatment of graft rejection lung inflammation, nephrotic syndrome, preeclampsia, pericardial effusion, such as that associated with pericarditis, and pleural effusion, diseases and disorders characterized by undesirable vascular permeability, e.g., edema associated with brain tumors, ascites associated with malignancies, Meigs' syndrome, lung inflammation, nephrotic syndrome, pericardial effusion, pleural effusion, permeability associated with cardiovascular diseases such as the condition following myocardial infarctions and strokes and the like.

[0146] Other angiogenesis-dependent diseases according to this invention include angiofibroma (abnormal blood of vessels which are prone to bleeding), neovascular glaucoma (growth of blood vessels in the eye), arteriovenous malformations (abnormal communication between arteries and veins), nonunion fractures (fractures that will not heal), atherosclerotic plaques (hardening of the arteries), pyogenic granuloma (common skin lesion composed of blood vessels), scleroderma (a form of connective tissue disease), hemangioma (tumor composed of blood vessels), trachoma (leading cause of blindness in the third world), hemophilic joints, vascular adhesions and hypertrophic scars (abnormal scar formation).

[0147] The term “VEGF” or “VEGF” as used herein refers to the 165-amino acid human-vascular endothelial cell growth factor and related 121-, 189-, and 206-amino acid human vascular endothelial cell growth factors, as described by Leung et al. Science, 246:1306 (1989), and Houck et al. Mol. Endocrin., 5:1806 (1991), together with the naturally occurring allelic and processed forms thereof. The term “VEGF” also refers to VEGFs from non-human species such as mouse, rat or primate. Sometimes the VEGF from a specific species are indicated by terms such as hVEGF for human VEGF, mVEGF for murine VEGF, and etc. The term “VEGF” is also used to refer to truncated forms of the polypeptide comprising amino acids 8 to 109 or 1 to 109 of the 165-amino acid human vascular endothelial cell growth factor. Reference to any such forms of VEGF may be identified in the present application, e.g., by “VEGF (8-109),” “VEGF (1-109)” or “VEGF₁₆₅.” The amino acid positions for a “truncated” native VEGF are numbered as indicated in the native VEGF sequence. For example, amino acid position 17 (methionine) in truncated native VEGF is also position 17 (methionine) in native VEGF. The truncated native VEGF has binding affinity for the KDR and Flt-1 receptors comparable to native VEGF.

[0148] The term “VECGF variant” as used herein refers to a VEGF polypeptide which includes one or more amino acid mutations in the native VEGF sequence. Optionally, the one or more amino acid mutations include amino acid substitution(s). For purposes of shorthand designation of VEGF variants described herein, it is noted that numbers refer to the amino acid residue position along the amino acid sequence of the putative native VEGF (provided in Leung et al., supra and Houck et al., supra).

[0149] The terms “cancer” and “cancerous” refer to or describe the physiological condition in mammals that is typically characterized by unregulated cell growth. Examples of cancer include but are not limited to, carcinoma, lymphoma, blastoma, sarcoma, and leukemia. More particular examples of such cancers include squamous cell cancer, small-cell lung cancer, non-small cell lung cancer, gastrointestinal cancer, pancreatic cancer, glioblastoma, cervical cancer, ovarian cancer, liver cancer, bladder cancer, hepatoma, breast cancer, colon cancer, colorectal cancer, endometrial carcinoma, salivary gland carcinoma, kidney cancer, renal cancer, prostate cancer, vulval cancer, thyroid cancer, hepatic carcinoma and various types of head and neck cancer. “Mammal” for purposes of treatment refers to any animal classified as a mammal, including humans, domestic and farm animals, nonhuman primates, and zoo, sports, or pet animals, such as dogs, horses, cats, cows, etc.

[0150] The term “anti-neoplastic composition” refers to a composition useful in treating cancer comprising at least one active therapeutic agent, e.g., “anti-cancer agent.” Examples of therapeutic agents (anticancer agents) include, but are limited to, e.g., chemotherapeutic agents, growth inhibitory agents, cytotoxic agents, agents used in radiation therapy, anti-angiogenesis agents, apoptotic agents, anti-tubulin agents, and other-agents to treat cancer, such as anti-HER-2 antibodies, anti-CD20 antibodies, an epidermal growth factor receptor (EGFR) antagonist (e.g., a tyrosine kinase inhibitor), HER1/EGFR inhibitor (e.g., erlotinib (Tarceva™), platelet derived growth factor inhibitors (e.g., Gleevec™ (Imatinib Mesylate)), a COX-2 inhibitor (e.g., celecoxib), interferons, cytokines, antagonists (e.g., neutralizing antibodies) that bind to one or more of the following targets ErbB2, ErbB3, ErbB4, PDGFR-beta, BlyS, APRIL, BCMA or VEGF receptor(s), TRAIL/Apo2, and other bioactive and organic chemical agents, etc. Combinations thereof are also included in the invention.

[0151] The term “epitope tagged” when used herein refers to an antibody mutant fused to an “epitope tag”. The epitope tag polypeptide has enough residues to provide an epitope against which an antibody thereagainst can be made, yet is short enough such that it does not interfere with activity of the antibody mutant. The epitope tag preferably also is fairly unique so that the antibody thereagainst does not substantially cross-react with other epitopes. Suitable tag polypeptide generally have at least 6 amino acid residues and usually between about 8-50 amino acid residues (preferably between about 9-30 residues). Examples include the flu HA tag polypeptide and its antibody 12CA5 (Field et al. Mol. Cell. Biol. 8:2159-2165 (1988)); the c-myc tag and the 8F9, 3C7, 6E10, G4, B7 and 9E10 antibodies thereagainst (Evan et al., Mol. Cell. Biol. 5(12):3610-3616 (1985)); and the Herpes Simplex virus glycoprotein D (gD) tag and its antibody (Paborsky et al., Protein Engineering 3(6):547-553 (1990)). In certain embodiments, the epitope tag is a “salvage receptor binding epitope”.

[0152] The term “cytotoxic agent” as used herein refers to a substance that inhibits or prevents the function of cells and/or causes destruction of cells. The term is intended to include radioactive isotopes (e.g., I¹³¹, I¹²⁵, Y⁹⁰ and Re¹⁸⁶), chemotherapeutic agents, and toxins such as enzymatically active toxins of bacterial, fungal, plant or animal origin, or fragments thereof.

[0153] A “chemotherapeutic agent” is a chemical compound useful in the treatment of cancer. Examples of chemotherapeutic agents include is a chemical compound useful in the treatment of cancer. Examples of chemotherapeutic agents include alkylating agents such as thiotepa and CYTOXAN® cyclosphosphamide; alkyl sulfonates such as busulfan, improsulfan and piposulfan; aziridines such as benzodopa, carboquone, meturedopa, and uredopa; ethylenimines and methylamelamines including altretamine, triethylenemelamnine, trietylenephosphoramide, triethiylenethiophosphoramide and trimethylolomelamine; acetogenins (especially bullatacin and bullatacinone); a camptothecin (including the synthetic analogue topotecan); bryostatin; callystatin; CC-1065 (including its adozelesin, carzelesin and bizelesin synthetic analogues); cryptophycins (particularly cryptophycin 1 and cryptophycin 8); dolastatin; duocarmycin (including the synthetic analogues, KW-2189 and CB1-TM1); eleutherobin; pancratistatin; a sarcodictyin; spongistatin; nitrogen mustards such as chlorambucil, chlornaphazine, chotophospharnide, estrarnustine, ifosfamide, mechlorethamnine, mechlorethamine oxide hydrochloride, melphalan, novembichin, phenesterine, prednimustine, trofosfamide, uracil mustard; nitrosureas such as carmustine, chlorozotocin, fotemustine, lomustine, nimustine, and raniranustine; antibiotics such as the enediyne antibiotics (e.g., calicheamicin, especially calicheamicin gammaII and calicheamicin omegaII (see, e.g., Agnew, Chem Intl. Ed. Engl. 33: 183-186 (1994)); dynemicin, including dynemicin A; bisphosphonates, such as clodronate; an esperamnicin; as well as neocarzinostatin chromophore and related chromoprotein enediyne antiobiotic chromophores), aclacinomysins, actinomycin, authramycin, azaserine, bleomycins, cactinomycin, carabicin, carminomycin, carzinophilin, chromomycinis, dactinomycin, daunorubicin, detorubicin, 6-diazo-5-oxo-L-norleucine, ADRIAMYCIN® doxorubicin (including morpholino-doxorubicin, cyanomorpholino-doxorubicin, 2-pyrrolino-doxorubicin and deoxydoxorubicin), epirubicin, esorubicin, idarubicin, marcellomycin, mitomycins such as mitomycin C, mycophenolic acid, nogalamycin, olivomycins, peplomycin, potfiromycin, puromycin, quelamycin, rodorubicin, streptonigrin, streptozocin, tubercidin, ubenimex, zinostatin, zorubicin; anti-metabolites such as methotrexate and 5-fluorouracil (5-FU); folic acid analogues such as denopterin, methotrexate, pteropterin, trimetrexate; purine analogs such as fludarabine, 6-mercaptopurine, thiamiprine, thioguanine; pyrimidine analogs such as ancitabine, azacitidine, 6-azauridine, carmofur, cytarabine, dideoxyuridine, doxifluridine, enocitabine, floxuridine; androgens such as calusterone, dromostanolone propionate, epitiostanol, mepitiostane, testolactone; anti-adrenals such as aminoglutethimide, mitotane, trilostane; folic acid replenisher such as frolinic acid; aceglatone; aldophosphamide glycoside; aminolevulinic acid; eniluracil; amsacrine; bestrabucil; bisantrene; edatraxate; defofamine; demecolcine; diaziquone; elformithine; elliptinium acetate; an epothilone; etoglucid; gallium nitrate; hydroxyurea; lentinan; lonidainine; maytansinoids such as maytansine and ansamitocins; mitoguazone; mitoxantrone; mopidanmol; nitraerine; pentostatin; phenamet; pirarubicin; losoxantrone; podophyllinic acid; 2-ethylhydrazide; procarbazine; PSK® polysaccharide complex (JHS Natural Products, Eugene, Oreg.); razoxane; rhizoxin; sizofiran; spirogermanium; tenuazonic acid; triaziquone; 2,2′,2″-trichlorotriethylamine; trichothecenes (especially T-2 toxin, verracurin A, roridin A and anguidine); urethan; vindesine; dacarbazine; mannomustine; mitobronitol; mitolactol; pipobroman; gacytosine; arabinoside (“Ara-C”); cyclophosphamide; thiotepa; taxoids, e.g., TAXOL® paclitaxel (Bristol-Myers Squibb Oncology, Princeton, N.J.), ABRAXANE™ Cremophor-free, albumin-engineered nanoparticle formulation of paclitaxel (American Pharmaceutical Partners, Schaumberg, Ill.), and TAXOTERE® doxetaxel (Rhône-Poulenc Rorer, Antony, France); chloranbucil; GEMZAR® gemcitabine; 6-thioguanine; mercaptopurine; methotrexate; platinum analogs such as cisplatin and carboplatin; vinblastine; platinum; etoposide (VP-16); ifosfamide; mitoxantrone; vincristine; NAVELBENE® vinorelbine; novantrone; teniposide; edatrexate; daunomycin; antinopterin; xeloda; ibandronate; irinotecan (Camptosar, CPT-11) (including the treatment regimen of irinotecan with 5-FU and leucovorin); topoisomerase inhibitor RFS 2000; difluorometlhylornithine (DMFO); retinoids such as retinoic acid; capecitabine; combretastatin; leucovorin (LV); oxaliplatin, including the oxaliplatin treatment regimen (FOLFOX); inhibitors of PKC-alpha, Raf, H-Ras, EGFR (e.g., erlotinib (Tarceva™)) and VEGF-A that reduce cell proliferation and pharmaceutically acceptable salts, acids or derivatives of any of the above.

[0154] Also included in this definition are anti-hormonal agents that act to regulate or inhibit hormone action on tumors such as anti-estrogens and selective estrogen receptor modulators (SERMs), including, for example, tamoxifen (including NOLVADEX® tamoxifen), raloxifene, droloxifene, 4-hydroxytamoxifen, trioxifene, keoxifene, LY 117018, onapristone, and FARESTON toremifene; aromatase inhibitors that inhibit the enzyme aromatase, which regulates estrogen production in the adrenal glands, such as, for example, 4(5)-imidazoles, aminoglutethimide, MEGASE® megestrol acetate, AROMASIN® exemestane, formestanie, fadrozole, RIVISOR® vorozole, FEMARA® letrozole, and ARIMIDEX® anastrozole; and anti-androgens such as flutamide, nilutamide, bicalutamide, leuprolide, and goserelin; as well as troxacitabine (a 1,3-dioxolane nucleoside cytosine analog); antisense oligonucleotides, particularly those which inhibit expression of genes in signaling pathways implicated in abherant cell proliferation, such as, for example, PKC-alpha, Raf and H-Ras; ribozymes such as a VEGF expression inhibitor (e.g., ANGIOZYME® ribozyme) and a HER2 expression inhibitor; vaccines such as gene therapy vaccines, for example, ALLOVECTIN® vaccine, LEUVECTIN® vaccine, and VAXID® vaccine; PROLEUKIN® rIL-2; LURTOTECAN® topoisomerase 1 inhibitor; ABARELIX® rmRH; Vinorelbine and Esperamicins (see U.S. Pat. No. 4,675,187), and pharmaceutically acceptable salts, acids or derivatives of any of the above.

[0155] The term “prodrug” as used in this application refers to a precursor or derivative form of a pharmaceutically active substance that is less cytotoxic to tumor cells compared to the parent drug and is capable of being enzymatically activated or converted into the more active parent form. See, e.g., Wilman, “Prodrugs in Cancer Chemotherapy” Biochemical Society Transactions, 14, pp. 375-382, 615th Meeting Belfast (1986) and Stella et al., “Prodrugs: A Chemical Approach to Targeted Drug Delivery,” Directed Drug Delivery, Borchardt et al., (ed.), pp. 247-267, Humana Press (1985). The prodrugs of this invention include, but are not limited to, phosphate-containing prodrugs, thiophosphate-containing prodrugs, sulfate-containing prodrugs, peptide-containing prodrugs, D-amino acid-modified prodrugs, glycosylated prodrugs, β-lactam-containing prodrugs, optionally substituted phenoxyacetamide-containing prodrugs or optionally substituted phenylacetamide-containing prodrugs, 5-fluorocytosine and other 5-fluorouridine prodrugs which can be converted into the more active cytotoxic free drug. Examples of cytotoxic drugs that can be derivatized into a prodrug form for use in this invention include, but are not limited to, those chemotherapeutic agents described above.

[0156] For the treatment of rheumatoid arthritis, the patient can be treated with an antibody of the invention in conjunction with any one or more of the following drugs: DMARDS (disease-modifying anti-rheumatic drugs (e.g., methotrexate), NSAI or NSAID (non-steroidal anti-inflammatory drugs); HUMIRA™ (adalimumab; Abbott Laboratories), ARAVA® (leflunomide), REMICADE® (infliximab; Centocor Inc., of Malvern, Pa.), ENBREL™ (etanercept; Immunex, Wash.), COX-2 inhibitors. DMARDs commonly used in RA are hydroxycloroquine, sulfasalazine, methotrexate, leflunomide, etanercept, infliximab, azathioprine, D-penicillamine, Gold (oral), Gold (intramuscular), minocycline, cyclosporine, Staphylococcal protein A immunoadsorption. Adalimumab is a human monoclonal antibody that binds to TNFα. Infliximab is a chimeric monoclonal antibody that binds to TNFα. Etanercept is an “immunoadhesin” fusion protein consisting of the extracellular ligand binding portion of the human 75 kD (p75) tumor necrosis factor receptor (TNFR) linked to the Fc portion of a human IgG1. For conventional treatment of RA, see, e.g., “Guidelines for the management of rheumatoid arthritis” Arthritis & Rheumatism 46(2): 328-346 (February, 2002). In a specific embodiment, the RA patient is treated with a CD20 antibody of the invention in conjunction with methotrexate (MTX). An exemplary dosage of MTX is about 7.5-25 mg/kg/wk. MTX can be administered orally and subcutaneously.

[0157] For the treatment of ankylosing spondylitis, psoriatic arthritis and Crohn's disease, the patient can be treated with an antibody of the invention in conjunction with, for example, Remicade® (infliximab; from Centocor Inc., of Malvern, Pa.), ENBREL (etanercept; Immunex, Wash.).

[0158] For treatments for SLE, the patient can be treated with an antibody of the invention in conjunction with, for example, a high-dose corticosteroids and/or cyclophosphamide (HDCC).

[0159] For the treatment of psoriasis, patients can be administered an antibody of this invention in conjunction with topical treatments, such as topical steroids, anthralin, calcipotriene, clobetasol, and tazarotene, or with methotrexate, retinoids, cyclosporine, PUVA and UVB therapies. In one embodiment, the psoriasis patient is treated with the antibody sequentially or concurrently with cyclosporine.

[0160] An “isolated” nucleic acid molecule is a nucleic acid molecule that is identified and separated from at least one contaminant nucleic acid molecule with which it is ordinarily associated in the natural source of the antibody nucleic acid. An isolated nucleic acid molecule is other than in the form or setting in which it is found in nature. Isolated nucleic acid molecules therefore are distinguished from the nucleic acid molecule as it exists in natural cells. However, an isolated nucleic acid molecule includes a nucleic acid molecule contained in cells that ordinarily express the antibody where, for example, the nucleic acid molecule is in a chromosomal location different from that of natural cells.

[0161] The expression “control sequences” refers to DNA sequences necessary for the expression of an operably linked coding sequence in a particular host organism. The control sequences that are suitable for prokaryotes, for example, include a promoter, optionally an operator sequence, and a ribosome binding site. Eukaryotic cells are known to utilize promoters, polyadenylation signals, and enhancers.

[0162] Nucleic acid is “operably linked” when it is placed into a functional relationship with another nucleic acid sequence. For example, DNA for a presequence or secretory leader is operably linked to DNA for a polypeptide if it is expressed as a preprotein that participates in the secretion of the polypeptide; a promoter or enhancer is operably linked to a coding sequence if it affects the transcription of the sequence; or a ribosome binding site is operably linked to a coding sequence if it is positioned so as to facilitate translation. Generally, “operably linked” means that the DNA sequences being linked are contiguous, and, in the case of a secretory leader, contiguous and in reading phase. However, enhancers do not have to be contiguous. Linking is accomplished by ligation at convenient restriction sites. If such sites do not exist, the synthetic oligonucleotide adaptors or linkers are used in accordance with conventional practice.

[0163] As used herein, the expressions “cell,” “cell line,” and “cell culture” are used interchangeably and all such designations include progeny. Thus, the words “transformants” and “transformed cells” include the primary subject cell and cultures derived therefrom without regard for the number of transfers. It is also understood that all progeny may not be precisely identical in DNA content, due to deliberate or inadvertent mutations. Mutant progeny that have the same function or biological activity as screened for in the originally transformed cell are included. Where distinct designations are intended, it will be clear from the context.

II. Modes for Carrying out the Invention

Synthetic High-Affinity Anti-VEGF Antibodies

[0164] The invention herein provides novel anti-VEGF antibodies with high binding affinity to VEGF. Exemplary methods for generating antibodies are described in more detail in the following sections.

[0165] The novel anti-VEGF antibodies are selected using the VEGF antigen derived from a first mammalian species. Preferably the antigen is human VEGF (hVEGF). However, VEGFs from other species such as murine VEGF (mVEGF) can also be used as the first target antigen. The VEGF antigens from various mammalian species may be isolated from natural sources. In other embodiments, the antigen is produced recombinantly or made using other synthetic methods known in the art.

[0166] The antibody selected will normally have a sufficiently strong binding affinity for the first VEGF antigen. For example, the antibody may bind hVEGF with a K_{d} value of no more than about 5 nM, preferably no more than about 2 nM, and more preferably no more than about 500 pM. Antibody affinities may be determined by a surface plasmon resonance based assay (such as the BIAcore assay as described in Examples); enzyme-linked immunoabsorbent-assay (ELISA); and competition assays (e.g. RIA's), for example.

[0167] Also, the antibody may be subjected to other biological activity assays, e.g., in order to evaluate its effectiveness as a therapeutic. Such assays are known in the art and depend on the target antigen and intended use for the antibody. Examples include the HUVEC inhibition assay (as described in the Examples below); tumor cell growth inhibition assays (as described in WO 89/06692, for example); antibody-dependent cellular cytotoxicity (ADCC) and complement-mediated cytotoxicity (CDC) assays (U.S. Pat. No. 5,500,362); and agonistic activity or hematopoiesis assays (see WO 95/27062).

[0168] To screen for antibodies which bind to a particular epitope on the antigen of interest, a routine cross-blocking assay such as that described in Antibodies, A Laboratory Manual, Cold Spring Harbor Laboratory, Ed Harlow and David Lane (1988), can be performed. Alternatively, epitope mapping, e.g. as described in Champe et al., J. Biol. Chem. 270:1388-1394 (1995), can be performed to determine whether the antibody binds an epitope of interest.

[0169] Species-specificity of the novel antibodies is then determined. The binding affinity of the antibody for a homologue of the antigen used to select the antibody (where the homologue is from the “second mammalian species”) is assessed using techniques such as those described above. In preferred embodiments, the second mammalian species is a nonhuman mammal to which the antibody will be administered in preclinical studies. Accordingly, the second mammalian species may be a nonhuman primate, such as rhesus, cynomolgus, baboon, chimpanzee and macaque. In other embodiment, the second mammalian species may be a rodent (e.g., mouse or rat), cat or dog, for example.

[0170] While the preferred method of the instant invention for determining species-dependence (and for evaluating antibody mutants with improved properties; see below) is to quantify antibody binding affinity, in other embodiments of the invention, one or more biological properties of the synthetic antibody and antibody variants are evaluated in addition to, or instead of, binding affinity determinations. Exemplary such biological assays are described above. Such assays are particularly useful where they provide an indication as to the therapeutic effectiveness of the antibody. Normally, though not necessarily, antibodies which show improved properties in such assays, will also have an enhanced binding affinity. Thus, in one embodiment of the invention where the assay of choice is a biological activity assay other than an binding affinity assay, the species-dependent antibody will normally have a “biological activity” using “material” (e.g. antigen, cell, tissue, organ or whole animal) from the second mammalian species which is at least about 50 fold, or at least about 500 fold, or at least about 1000 fold, less effective than its biological activity in a corresponding assay using reagents from the first mammalian species.

[0171] The species-dependent antibody is then altered so as to generate an antibody mutant which has a stronger binding affinity for the antigen from the second mammalian species, than the species-dependent antibody. The antibody mutant preferably has a binding affinity for the antigen from the nonhuman mammal which is at least about 10 fold stronger, preferably at least about 20 fold stronger, more preferably at least about 50 fold stronger, and sometimes at least about 100 fold or 200 fold stronger, than the binding affinity of the species-dependent antibody for the antigen. The enhancement in binding affinity desired or required will depend on the initial binding affinity of the species-dependent antibody. Where the assay used is a biological activity assay, the antibody mutant preferably has a biological activity in the assay of choice which is at least about 10 fold better, preferably at least about 20 fold better, more preferably at least about 50 fold better, and sometimes at least about 100 fold or 200 fold better, than the biological activity of the species-dependent antibody in that assay.

[0172] To generate the antibody mutant, one or more amino acid alterations (e.g. substitutions) are introduced in one or more of the hypervariable regions of the species-dependent antibody. Alternatively, or in addition, one or more alterations (e.g. substitutions) of framework region residues may be introduced in the species-dependent antibody where these result in an improvement in the binding affinity of the antibody mutant for the antigen from the second mammalian species. Examples of framework region residues to modify include those which non-covalently bind antigen directly (Amit et al. Science 233:747-753 (1986)); interact with/effect the conformation of a CDR (Chothia et al. J. Mol. Biol. 196:901-917 (1987)); and/or participate in the V_{L}-V_{H} interface (EP 239 400B1). In certain embodiments, modification of one or more of such framework region residues results in an enhancement of the binding affinity of the antibody for the antigen from the second mammalian species. For example, from about one to about five framework residues may be altered in this embodiment of the invention. Sometimes, this may be sufficient to yield an antibody mutant suitable for use in preclinical trials, even where none of the hypervariable region residues have been altered. Normally, however, the antibody mutant will comprise additional hypervariable region alteration(s).

[0173] The hypervariable region residues which are altered may be changed randomly, especially where the starting binding affinity of the species-dependent antibody for the antigen from the second mammalian species is such that such randomly produced antibody mutants can be readily screened.

[0174] One useful procedure for generating such antibody mutants is called “alanine scanning mutagenesis” (Cunningham and Wells Science 244:1081-1085 (1989)). Here, one or more of the hypervariable region residue(s) are replaced by alanine or polyalanine residue(s) to affect the interaction of the amino acids with the antigen from the second mammalian species. Those hypervariable region residue(s) demonstrating functional sensitivity to the substitutions then are refined by introducing further or other mutations at or for the sites of substitution. Thus, while the site for introducing an amino acid sequence variation is predetermined, the nature of the mutation per se need not be predetermined. The ala-mutants produced this way are screened for their biological activity as described herein.

[0175] Another procedure for generating such antibody mutants involves affinity maturation using phage display (Hawkins et al. J. Mol. Biol. 254:889-896 (1992) and Lowman et al. Biochemistry 30(45): 10832-10837 (1991)). Briefly, several hypervariable region sites (e.g. 6-7 sites) are mutated to generate all possible amino substitutions at each site. The antibody mutants thus generated are displayed in a monovalent fashion from filamentous phage particles as fusions to the gene III product of M13 packaged within each particle. The phage-displayed mutants are then screened for their biological activity (e.g. binding affinity) as herein disclosed.

[0176] The invention also provides a more systematic method for identifying amino acid residues to modify. According to this method, one identifies hypervariable region residues in the species-dependent antibody which are involved in binding the antigen from the first mammalian species and those hypervariable region residues involved in binding a homologue of that antigen from the second mammalian species. To achieve this, an alanine-scan of the hypervariable region residues of the species-dependent antibody can be performed, with each ala-mutant being testing for binding to the antigen from the first and second mammalian species. Alternatively, the X-ray crystal structures of antibody-antigen complexes are analyzed for contacting residues as well as surrounding residues (as described in Examples). The hypervariable region residues involved in binding the antigen from the first mammalian species (e.g. human), and those involved in binding the homologue of the antigen from the second mammalian species (e.g. nonhuman mammal) are thereby identified. Preferably, those residue(s) significantly involved in binding the antigen from the second mammalian species (e.g. nonhuman mammal), but not the antigen from the first mammalian species (e.g. human), are chosen as candidates for modification. In another embodiment, those residue(s) significantly involved in binding the antigen from both the first and second mammalian species are selected to be modified (see Example below). In yet a further but less preferred embodiment, those residues involved in binding the antigen from the first mammalian species, but not the second mammalian species, are selected for modification. Such modification can involve deletion of the residue or insertion of one or more residues adjacent to the residue. However, normally the modification involves substitution of the residue for another amino acid.

[0177] Normally one would start with a conservative substitution such as those shown below under the heading of “preferred substitutions”. If such substitutions result in a change in biological activity (e.g. binding affinity), then more substantial changes, denominated “exemplary substitutions” in the following table, or as further described below in reference to amino acid classes, are introduced and the products screened.

[0178] Preferred Substitutions:

| | Exemplary | Preferred |
|---|---|---|
| Original Residue | Substitutions | Substitutions |
| Ala (A) | val; leu; ile | val |
| Arg (R) | lys; gln; asn | lys |
| Asn (N) | gln; his; lys; arg | gln |
| Asp (D) | glu | glu |
| Cys (C) | ser | ser |
| Gln (Q) | asn | asn |
| Glu (E) | asp | asp |
| Gly (G) | pro; ala | ala |
| His (H) | asn; gln; lys; arg | arg |
| Ile (I) | leu; val; met; ala; | leu |
| | phe; norleucine | |
| Leu (L) | norleucine; ile; val; | ile |
| | met; ala; phe | |
| Lys (K) | arg; gln; asn | |
| Met (M) | leu; phe; ile | leu |
| Phe (F) | leu; val; ile; ala; tyr | leu |
| Pro (P) | ala | ala |
| Ser (S) | thr | thr |
| Thr (T) | ser | ser |
| Trp (W) | tyr; phe | tyr |
| Tyr (Y) | trp; phe; thr; ser | phe |
| Val (V) | ile; leu; met; phe; | leu |
| | ala; norleucine | |

[0179] Even more substantial modifications in the antibodies biological properties are accomplished by selecting substitutions that differ significantly in their effect on maintaining (a) the structure of the polypeptide backbone in the area of the substitution, for example, as a sheet or helical conformation, (b) the charge or hydrophobicity of the molecule at the target site, or (c) the bulk of the side chain. Naturally occurring residues are divided into groups based on common side-chain properties:

[0180] (1) hydrophobic: norleucine, met, ala, val, leu, ile;

[0181] (2) neutral hydrophilic: cys, ser, thr, asn, gln;

[0182] (3) acidic: asp, glu;

[0183] (4) basic: his, lys, arg;

[0184] (5) residues that influence chain orientation: gly, pro; and

[0185] (6) aromatic: trp, tyr, phe.

[0186] Non-conservative substitutions will entail exchanging a member of one of these classes for another class.

[0187] In another embodiment, the sites selected for modification are affinity matured using phage display (see above).

[0188] Nucleic acid molecules encoding amino acid sequence mutants are prepared by a variety of methods known in the art. These methods include, but are not limited to, oligonucleotide-mediated (or site-directed) mutagenesis, PCR mutagenesis, and cassette mutagenesis of an earlier prepared mutant or a non-mutant version of the species-dependent antibody. The preferred method for making mutants is site directed mutagenesis (see, e.g., Kunkel, Proc. Natl. Acad. Sci. USA 82:488 (1985)).

[0189] In certain embodiments, the antibody mutant will only have a single hypervariable region residue substituted. In other embodiments, two or more of the hypervariable region residues of the species-dependent antibody will have been substituted, e.g. from about two to about ten hypervariable region substitutions. For example, the murinized anti-VEGF antibody variant of the example below had four hypervariable region substitutions.

[0190] Ordinarily, the antibody mutant with improved biological properties will have an amino acid sequence having at least 75% amino acid sequence identity or similarity with the amino acid sequence of either the heavy or light chain variable domain of the species-dependent antibody, more preferably at least 80%, more preferably at least 85%, more preferably at least 90%, and most preferably at least 95%. Identity or similarity with respect to this sequence is defined herein as the percentage of amino acid residues in the candidate sequence that are identical (i.e. same residue) or similar (i.e. amino acid residue from the same group based on common side-chain properties, see above) with the species-dependent antibody residues, after aligning the sequences and introducing gaps, if necessary, to achieve the maximum percent sequence identity. None of N-terminal, C-terminal, or internal extensions, deletions, or insertions into the antibody sequence outside of the variable domain shall be construed as affecting sequence identity or similarity.

[0191] Following production of the antibody mutant, the biological activity of that molecule relative to the species-dependent antibody is determined. As noted above, this may involve determining the binding affinity and/or other biological activities of the antibody. In a preferred embodiment of the invention, a panel of antibody mutants are prepared above and are screened for binding affinity for the antigen from the second mammalian species. One or more of the antibody mutants selected from this initial screen are optionally subjected to one or more further biological activity assays to confirm that the antibody mutant(s) with enhanced binding affinity are indeed useful, e.g. for preclinical studies. En preferred embodiments, the antibody mutant retains the ability to bind the antigen from the first mammalian species with a binding affinity similar to the species-dependent antibody. This may be achieved by avoiding altering hypervariable region residues involved in binding the antigen from the first mammalian species. In other embodiments, the antibody mutant may have a significantly altered binding affinity for the antigen from the first mammalian species (e.g. the binding affinity for that antigen is preferably better, but may be worse than the species-dependent antibody).

[0192] The antibody mutant(s) so selected may be subjected to further modifications, oftentimes depending on the intended use of the antibody. Such modifications may involve further alteration of the amino acid sequence, fusion to heterologous polypeptide(s) and/or covalent modifications such as those elaborated below. With respect to amino acid sequence alterations, exemplary modifications are elaborated above. For example, any cysteine residue not involved in maintaining the proper conformation of the antibody mutant also may be substituted, generally with serine, to improve the oxidative stability of the molecule and prevent aberrant cross linking. Conversely, cysteine bond(s) may be added to the antibody to improve its stability (particularly where the antibody is an antibody fragment such as an Fv fragment). Another type of amino acid mutant has an altered glycosylation pattern. This may be achieved by deleting one or more carbohydrate moieties found in the antibody, and/or adding one or more glycosylation sites that are not present in the antibody. Glycosylation of antibodies is typically either N-linked or O-linked. N-linked refers to the attachment of the carbohydrate moiety to the side chain of an asparagine residue. The tripeptide sequences asparagine-X-serine and asparagine-X-threonine, where X is any amino acid except proline, are the recognition sequences for enzymatic attachment of the carbohydrate moiety to the asparagine side chain. Thus, the presence of either of these tripeptide sequences in a polypeptide creates a potential glycosylation site. O-linked glycosylation refers to the attachment of one of the sugars N-aceylgalactosamine, galactose, or xylose to a hydroxyamino acid, most commonly serine or threonine, although 5-hydroxyproline or 5-hydroxylysine may also be used. Addition of glycosylation sites to the antibody is conveniently accomplished by altering the amino acid sequence such that it contains one or more of the above-described tripeptide sequences (for N-linked glycosylation sites). The alteration may also be made by the addition of, or substitution by, one or more serine or threonine residues to the sequence of the original antibody (for O-linked glycosylation sites).

[0193] Techniques for producing antibodies, which may be species-dependent and therefore require modification according to the techniques elaborated herein, follow:

A. Generation of High-Affinity Anti-VEGF Antibodies from Synthetic Antibody Phage Libraries

[0194] The invention also provide a method for generating and selecting novel high-affinity anti-VEGF antibodies using a unique phage display approach. The approach involves generation of synthetic antibody phage libraries based on single framework template, design of sufficient diversities within variable domains, display of polypeptides having the diversified variable domains, selection of candidate antibodies with high affinity to target VEGF antigen, and isolation of the selected antibodies.

[0195] Details of the phage display methods can be found, for example, in the provisional U.S. Application No. 60/385,338 (filed Jun. 3, 2002) and relating applications, the entire disclosures of which are expressly incorporated herein by reference.

[0196] In one aspect, the antibody libraries used in the invention can be generated by mutating the solvent accessible and/or highly diverse positions in at least one CDR of an antibody variable domain. Some or all of the CDRs can be mutated using the methods provided herein. In some embodiments, it may be preferable to generate diverse antibody libraries by mutating positions in CDRH1, CDRH2 and CDRH3 to form a single library or by mutating positions in CDRL3 and CDRH3 to form a single library or by mutating positions in CDRL3 and CDRH1, CDRH2 and CDRH3 to form a single library.

[0197] A library of antibody variable domains can be generated, for example, having mutations in the solvent accessible and/or highly diverse positions of CDRH1, CDRH2 and CDRH3. Another library can be generated having mutations in CDRL1, CDRL2 and CDRL3. These libraries can also be used in conjunction with each other to generate binders of desired affinities. For example, after one or more rounds of selection of heavy chain libraries for binding to a target antigen, a light chain library can be replaced into the population of heavy chain binders for further rounds of selection to increase the affinity of the binders.

[0198] Preferably, a library is created by substitution of original amino acids with variant amino acids in the CDRH3 region of the variable region of the heavy chain sequence. The resulting library can contain a plurality of antibody sequences, wherein the sequence diversity is primarily in the CDRH3 region of the heavy chain sequence.

[0199] In one aspect, the library is created in the context of the humanized antibody 4D5 sequence, or the sequence of the framework amino acids of the humanized antibody 4D5 sequence. Preferably, the library is created by substitution of at least residues 95-101a of the heavy chain with amino acids encoded by the DVK codon set, wherein the DVK codon set is used to encode a set of variant amino acids for every one of these positions. An example of an oligonucleotide set that is useful for creating these substitutions comprises the sequence (DVK)₇. In some embodiments, a library is created by substitution of residues 95-100a with amino acids encoded by both DVK and NNK codon sets. An example of an oligonucleotide set that is useful for creating these substitutions comprises the sequence (DVK)₆(NNK). In another embodiment, a library is created by substitution of at least residues 95-100a with amino acids encoded by both DVK and NNK codon sets. An example of an oligonucleotide set that is useful for creating these substitutions comprises the sequence (DVK)₅(NNK). Another example of an oligonucleotide set that is useful for creating these substitutions comprises the sequence (NNK)₆. Other examples of suitable oligonucleotide sequences can be determined by one skilled in the art according to the criteria described herein.

[0200] In another embodiment, different CDRH3 designs are utilized to isolate high affinity binders and to isolate binders for a variety of epitopes. The range of lengths of CDRH3 generated in this library is 11 to 13 amino acids, although lengths different from this can also be generated. H3 diversity can be expanded by using NNK, DVK and NVK codon sets, as well as more limited diversity at N and/or C-terminal.

[0201] Diversity can also be generated in CDRH1 and CDRH2. The designs of CDR-H1 and H2 diversities follow the strategy of targeting to mimic natural antibodies repertoire as described with modification that focus the diversity more closely matched to the natural diversity than previous design.

[0202] For diversity in CDRH3, multiple libraries can be constructed separately with different lengths of H3 and then combined to select for binders to target antigens. The multiple libraries can be pooled and sorted using solid support selection and solution sorting methods as described previously and herein below. Multiple sorting satrategies may be employed. For example, one variation involves sorting on-target bound to a solid, followed by sorting for a tag that may be present on the fusion polypeptide (eg. anti-gD tag) and followed by another sort on target bound to solid. Alternatively, the libraries can be sorted first on target bound to a solid surface, the eluted binders are then sorted using solution phase binding with decreasing concentrations of target antigen. Utilizing combinations of different sorting methods provides for minimization of selection of only highly expressed sequences and provides for selection of a number of different high affinity clones.

[0203] High affinity binders for the target VEGF antigen can be isolated from the libraries. Limiting diversity in the H1/H2 region decreases degeneracy about 10⁴ to 10⁵ fold and allowing more H3 diversity provides for more high affinity binders. Utilizing libraries with different types of diversity in CDRH3 (eg. utilizing DVK or NVT) provides for isolation of binders that may bind to different epitopes of a target antigen.

[0204] Of the binders isolated from the pooled libraries as described above, it has been discovered that affinity may be further improved by providing limited diversity in the light chain. Light chain diversity is generated in this embodiment as follows in CDRL1: amino acid position 28 is encoded by RDT; amino acid position 29 is encoded by RKT; amino acid position 30 is encoded by RVW; amino acid position 31 is encoded by ANW; amino acid position 32 is encoded by THT; optionally, amino acid position 33 is encoded by CTG; in CDRL2: amino acid position 50 is encoded by KBG; amino acid position 53 is encoded by AVC; and optionally, amino acid position 55 is encoded by GMA; in CDRL3: amino acid position 91 is encoded by TMT or SRT or both; amino acid position 92 is encoded by DMC; amino acid position 93 is encoded by RVT; amino acid position 94 is encoded by NHT; and amino acid position 96 is encoded by TWT or YKG or both.

[0205] In another embodiment, a library or libraries with diversity in CDRH1, CDRH2 and CDRH3 regions is generated. In this embodiment, diversity in CDRH3 is generated using a variety of lengths of H3 regions and using primarily codon sets XYZ and NNK or NNS. Libraries can be formed using individual oligonucleotides and pooled or oligonucleotides can be pooled to form a subset of libraries. The libraries of this embodiment can be sorted against target bound to solid. Clones isolated from multiple sorts can be screened for specificity and affinity using ELISA assays. For specificity, the clones can be screened against the desired target antigens as well as other nontarget antigens. Those binders to the target VEGF antigen can then be screened for affinity in solution binding competition ELISA assay or spot competition assay. High affinity binders can be isolated from the library utilizing XYZ codon sets prepared as described above. These binders can be readily produced as antibodies or antigen binding fragments in high yield in cell culture.

[0206] In some embodiments, it may be desirable to generate libraries with a greater diversity in lengths of CDRH3 region. For example, it may be desirable to generate libraries with CDRH3 regions ranging from about 7 to 19 amino acids.

[0207] High affinity binders isolated from the libraries of these embodiments are readily produced in bacterial and eukaryotic cell culture in high yield. The vectors can be designed to readily remove sequences such as gD tags, viral coat protein component sequence, and/or to add in constant region sequences to provide for production of full length antibodies or antigen binding fragments in high yield.

[0208] A library with mutations in CDRH3 can be combined with a library containing variant versions of other CDRs, for example CDRL1, CDRL2, CDRL3, CDRH1 and/or CDRH2. Thus, for example, in one embodiment, a CDRH3 library is combined with a CDRL3 library created in the context of the humanized 4D5 antibody sequence with variant amino acids at positions 28, 29, 30, 31, and/or 32 using predetermined codon sets. In another embodiment, a library with mutations to the CDRH3 can be combined with a library comprising variant CDRH1 and/or CDRH2 heavy chain variable domains. In one embodiment, the CDRH1 library is created with the humanized antibody 4D5 sequence with variant amino acids at positions 28, 30, 31, 32 and 33. A CDRH2 library may be created with the sequence of humanized antibody 4D5 with variant amino acids at positions 50, 52, 53, 54, 56 and 58 using the predetermined codon sets.

B. Vectors, Host Cells and Recombinant Methods

[0209] The anti-VEGF antibody of the invention can be produced recombinantly, using techniques and materials readily obtainable.

[0210] For recombinant production of an anti-VEGF antibody, the nucleic acid encoding it is isolated and inserted into a replicable vector for further cloning (amplification of the DNA) or for expression DNA encoding the antibody is readily isolated or synthethized using conventional procedures (e.g., by using oligonucleotide probes that are capable of binding specifically to DNAs encoding the heavy and light chains of the antibody). Many vectors are available. The vector components generally include, but are not limited to, one or more of the following: a signal sequence, an origin of replication, one or more marker genes, an enhancer element, a promoter, and a transcription termination sequence.

(i) Signal Sequence Component

[0211] The antibody of this invention may be produced recombinantly not only directly, but also as a fusion polypeptide with a heterologous polypeptide, which is preferably a signal sequence or other polypeptide having a specific cleavage site at the N-terminus of the mature protein or polypeptide. The heterologous signal sequence selected preferably is one that is recognized and processed (i.e., cleaved by a signal peptidase) by the host cell. For prokaryotic host cells that do not recognize and process the native antibody signal sequence, the signal sequence is substituted by a prokaryotic signal sequence selected, for example, from the group of the alkaline phosphatase, penicillinase, lpp, or heat-stable enterotoxin II leaders. For yeast secretion the native signal sequence may be substituted by, e.g., the yeast invertase leader, a factor leader (including Saccharomyces and Kluyveromyces α-factor leaders), or acid phosphatase leader, the C. albicans glucoamylase leader, or the signal described in WO 90/13646. In mammalian cell expression, mammalian signal sequences as well as viral secretory leaders, for example, the herpes simplex gD signal, are available.

[0212] The DNA for such precursor region is ligated in reading frame to DNA encoding the antibody.

(ii) Origin of Replication Component

[0213] Both expression and cloning vectors contain a nucleic acid sequence that enables the vector to replicate in one or more selected host cells. Generally, in cloning vectors this sequence is one that enables the vector to replicate independently of the host chromosomal DNA, and includes origins of replication or autonomously replicating sequences. Such sequences are well known for a variety of bacteria, yeast, and viruses. The origin of replication from the plasmid pBR322 is suitable for most Gram-negative bacteria, the 2μ plasmid origin is suitable for yeast, and various viral origins (SV40, polyoma, adenovirus, VSV or BPV) are useful for cloning vectors in mammalian cells. Generally, the origin of replication component is not needed for mammalian expression vectors (the SV40 origin may typically be used only because it contains the early promoter).

(iii) Selection Gene Component

[0214] Expression and cloning vectors may contain a selection gene, also termed a selectable marker. Typical selection genes encode proteins that (a) confer resistance to antibiotics or other toxins, e.g., ampicillin, neomycin, methotrexate, or tetracycline, (b) complement auxotrophic deficiencies, or (c) supply critical nutrients not available from complex media, e.g., the gene encoding D-alanine racemase for Bacilli.

[0215] One example of a selection scheme utilizes a drug to arrest growth of a host cell. Those cells that are successfully transformed with a heterologous gene produce a protein conferring drug resistance and thus survive the selection regimen. Examples of such dominant selection use the drugs neomycin, mycophenolic acid and hygromycin.

[0216] Another example of suitable selectable markers for mammalian cells are those that enable the identification of cells competent to take up the antibody nucleic acid, such as DHFR, thymidine kinase, metallothionein-I and -II, preferably primate metallothionein genes, adenosine deaminase, ornithine decarboxylase, etc.

[0217] For example, cells transformed with the DHFR selection gene are first identified by culturing all of the transformants in a culture medium that contains methotrexate (Mtx), a competitive antagonist of DHFR. An appropriate host cell when wild-type DHFR is employed is the Chinese hamster ovary (CHO) cell line deficient in DHFR activity.

[0218] Alternatively, host cells (particularly wild-type hosts that contain endogenous DHFR) transformed or co-transformed with DNA sequences encoding antibody, wild-type DHFR protein, and another selectable marker such as aminoglycoside 3′-phosphotransferase (APH) can be selected by cell growth in medium containing a selection agent for the selectable marker such as an aminoglycosidic antibiotic, e.g., kanamycin, neomycin, or G418. See U.S. Pat. No. 4,965,199.

[0219] A suitable selection gene for use in yeast is the trp1 gene present in the yeast plasmid YRp7 (Stinchcomb et al., Nature, 282:39 (1979)). The trp1 gene provides a selection marker for a mutant strain of yeast lacking the ability to grow in tryptophan, for example, ATCC No. 44076 or PEP4-1. Jones, Genetics, 85:12 (1977). The presence of the trp1 lesion in the yeast host cell genome then provides an effective environment for detecting transformation by growth in the absence of tryptophan. Similarly. Leu2-deficient yeast strains (ATCC 20,622 or 38,626) are complemented by known plasmids bearing the Leu2 gene.

[0220] In addition, vectors derived from the 1.6 μm circular plasmid pKD1 can be used for transformation of Kluyveromyces yeasts. Alternatively, an expression system for large-scale production of recombinant calf chymosin was reported for K. lactis. Van den Berg. Bio/Technology, 8:135 (1990). Stable multi-copy expression vectors for secretion of mature recombinant human serum albumin by industrial strains of Kluyveromyces have also been disclosed. Fleer et al., Bio/Technology, 9:968-975 (1991).

(iv) Promoter Component

[0221] Expression and cloning vectors usually contain a promoter that is recognized by the host organism and is operably linked to the antibody nucleic acid. Promoters suitable for use with prokaryotic hosts include the phoA promoter, β-lactamase and lactose promoter systems, alkaline phosphatase, a tryptophan (trp) promoter system and hybrid promoters such as the tac promoter. However, other known bacterial promoters are suitable. Promoters for use in bacterial systems also will contain a Shine-Dalgarno (S.D.) sequence operably linked to the DNA encoding the antibody.

[0222] Promoter sequences are known for eukaryotes. Virtually all eukaryotic genes have an AT-rich region located approximately 25 to 30 bases upstream from the site where transcription is initiated. Another sequence found 70 to 80 bases upstream from the start of transcription of many genes is a CNCAAT region where N may be any nucleotide. At the 3′ end of most eukaryotic genes is an AATAAA sequence that may be the signal for addition of the poly A tail to the 3′ end of the coding sequence. All of these sequences are suitably inserted into eukaryotic expression vectors.

[0223] Examples of suitable promoting sequences for use with yeast hosts include the promoters for 3-phosphoglycerate kinase or other glycolytic enzymes, such as enolase, glyceraldehyde-3-phosphate dehydrogenase, hexokinase, pyruvate decarboxylase, phosphofructokinase, glucose-6-phosphate isomerase, 3-phosphoglycerate mutase, pyruvate kinase, triosephosphate isomerase, phosphoglucose isomerase, and glucokinase.

[0224] Other yeast promoters, which are inducible promoters having the additional advantage of transcription controlled by growth conditions, are the promoter regions for alcohol dehydrogenase 2, isocytochrome C, acid phosphatase, degradative enzymes associated with nitrogen metabolism, metallothionein, glyceraldehyde-3-phosphate dehydrogenase, and enzymes responsible for maltose and galactose utilization. Suitable vectors and promoters for use in yeast expression are further described in EP 73,657. Yeast enhancers also are advantageously used with yeast promoters.

[0225] Antibody transcription from vectors in mammalian host cells is controlled, for example, by promoters obtained from the genomes of viruses such as polyoma virus, fowlpox virus, adenovirus (such as Adenovirus 2), bovine papilloma virus, avian sarcoma virus, cytomegalovirus, a retrovirus, hepatitis-B virus and most preferably Simian Virus 40 (SV40), from heterologous mammalian promoters, e.g., the actin promoter or an immunoglobulin promoter, from heat-shock promoters, provided such promoters are compatible with the host cell systems.

[0226] The early and late promoters of the SV40 virus are conveniently obtained as an SV40 restriction fragment that also contains the SV40 viral origin of replication. The immediate early promoter of the human cytomegalovirus is conveniently obtained as a HindIII E restriction fragment. A system for expressing DNA in mammalian hosts using the bovine papilloma virus as a vector is disclosed in U.S. Pat. No. 4,419,446. A modification of this system is described in U.S. Pat. No. 4,601,978. See also Reyes et al., Nature 297:598-601 (1982) on expression of human β-interferon cDNA in mouse cells under the control of a thymidine kinase promoter from herpes simplex virus. Alternatively, the rous sarcoma virus long terminal repeat can be used as the promoter.

(v) Enhancer Element Component

[0227] Transcription of a DNA encoding the antibody of this invention by higher eukaryotes is often increased by inserting an enhancer sequence into the vector. Many enhancer sequences are now known from mammalian genes (globin, elastase, albumin, α-fetoprotein, and insulin). Typically, however, one will use an enhancer from a eukaryotic cell virus. Examples include the SV40 enhancer on the late side of the replication origin (bp 100-270), the cytomegalovirus early promoter enhancer, the polyoma enhancer on the late side of the replication origin, and adenovirus enhancers. See also Yaniv, Nature 297:17-18 (1982) on enhancing elements for activation of eukaryotic promoters. The enhancer may be spliced into the vector at a position 5′ or 3′ to the antibody-encoding sequence, but is preferably located at a site 5′ from the promoter.

(vi) Transcription Termination Component

[0228] Expression vectors used in eukaryotic host cells (yeast, fungi, insect, plant, animal, human, or nucleated cells from other multicellular organisms) will also contain sequences necessary for the termination of transcription and for stabilizing the mRNA. Such sequences are commonly available from the 5′ and, occasionally 3′, untranslated regions of eukaryotic or viral DNAs or cDNAs. These regions contain nucleotide segments transcribed as polyadenylated fragments in the untranslated portion of the mRNA encoding the antibody. One useful transcription termination component is the bovine growth hormone polyadenylation region. See WO94/11026 and the expression vector disclosed therein.

(vii) Selection and Transformation of Host Cells

[0229] Suitable host cells for cloning or expressing the DNA in the vectors herein are the prokaryote, yeast, or higher eukaryote cells described above. Suitable prokaryotes for this purpose include eubacteria, such as Gram-negative or Gram-positive organisms, for example, Enterobacteriaceae such as Escherichia, e.g., E. coli, Enterobacter, Erwinia, Klebsiella, Proteus, Salmonela, e.g., Salmonella typhimurium, Serratia, e.g., Serratia marcescans, and Shigella, as well as Bacilli such as B. subtilis and B. licheniformis (e.g., B. licheniformis 41P disclosed in DD 266,710 published 12 Apr. 1989), Pseudomonas such as P. aeruginosa, and Streptomyces. One preferred E. coli cloning host is E. coli 294 (ATCC 31,446), although other strains such as E. coli B, E. coli X1776 (ATCC 31,537), and E. coli W3110 (ATCC 27,325) are suitable. These examples are illustrative rather than limiting.

[0230] In addition to prokaryotes, eukaryotic microbes such as filamentous fungi or yeast are suitable cloning or expression hosts for antibody-encoding vectors. Saccharomyces cerevisiae, or common baker's yeast, is the most commonly used among lower eukaryotic host microorganisms. However, a number of other genera, species, and strains are commonly available and useful herein, such as Schizosaccharomyces pombe; Kluyveromyces hosts such as, e.g., K. lactis, K. fragilis (ATCC 12,424), K. bulgaricus (ATCC 16,045), K. wickeramii (ATCC 24,178), K. waltii (ATCC 56,500), K. drosophilarum (ATCC 36,906), K. thermotolerans, and K. marxianus, yarrowia (EP 402,226); Pichia pastoris (EP 183,070); Candida; Trichoderma reesia (EP 244,234); Neurospora crassa; Schwanniomyces such as Schwanniomyces occidentalis; and filamentous fungi such as, e.g., Neurospora, Penicillium, Tolypocladium, and Aspergillus hosts such as A. nidulans and A. niger.

[0231] Suitable host cells for the expression of glycosylated antibody are derived from multicellular organisms. Examples of invertebrate cells include plant and insect cells. Numerous baculoviral strains and variants and corresponding permissive insect host cells from hosts such as Spodoptera frugiperda (caterpillar), Aedes aegypti (mosquito), Aedes albopictus (mosquito), Drosophila melanogaster (fruitfly), and Bombyx mori have been identified. A variety of viral strains for transfection are publicly available, e.g., the L-1 variant of Autographa californica NPV and the Bm-5 strain of Bombyx mori NPV, and such viruses may be used as the virus herein according to the present invention, particularly for transfection of Spodoptera frugiperda cells. Plant cell cultures of cotton, corn, potato, soybean, petunia, tomato, and tobacco can also be utilized as hosts.

[0232] However, interest has been greatest in vertebrate cells, and propagation of vertebrate cells in culture (tissue culture) has become a routine procedure. Examples of useful mammalian host cell lines are monkey kidney CV1 line transformed by SV40 (COS-7, ATCC CRL 1651); human embryonic kidney line (293 or 293 cells subcloned for growth in suspension culture, Graham et al., J. Gen Virol. 36:59 (1977)); baby hamster kidney cells (BHK, ATCC CCL 10); Chinese hamster ovary cells/-DHFR (CHO, Urlaub et al., Proc. Natl. Acad. Sci. USA 77:4216 (1980)); mouse sertoli cells (TM4, Mather, Biol. Reprod. 23:243-251 (1980)); monkey kidney cells (CV1 ATCC CCL 70); African green monkey kidney cells (VERO-76, ATCC CRL-1587); human cervical carcinoma cells (HELA, ATCC CCL 2); canine kidney cells (MDCK, ATCC CCL 34); buffalo rat liver cells (BRL 3A, ATCC CRL 1442); human lung cells (W138, ATCC CCL 75); human liver cells (Hep G2, IB 8065); mouse mammary tumor (MMT 060562, ATCC CCL51); TRI cells (Mather et al., Annals N.Y. Acad. Sci. 383:44-68 (1982)); MRC 5 cells; FS4 cells; and a human hepatoma line (Hep G2).

[0233] Host cells are transformed with the above-described expression or cloning vectors for antibody production and cultured in conventional nutrient media modified as appropriate for inducing promoters, selecting transformants, or amplifying the genes encoding the desired sequences.

(viii) Culturing the Host Cells

[0234] The host cells used to produce the antibody of this invention may be cultured in a variety of media. Commercially available media such as Ham's F10 (Sigma), Minimal Essential Medium ((MEM), (Sigma), RPMI-1640 (Sigma), and Dulbecco's Modified Eagle's Medium ((DMEM), Sigma) are suitable for culturing the host cells. In addition, any of the media described in Ham et al., Meth. Enz. 58:44 (1979), Barnes et al., Anal. Biochem. 102:255 (1980), U.S. Pat. No. 4,767,704; 4,657,866; 4,927,762; 4,560,655; or 5,122,469; WO 90/03430; WO 87/00195; or U.S. Pat. Re. 30,985 may be used as culture media for the host cells. Any of these media may be supplemented as necessary with hormones and/or other growth factors (such as insulin, transferrin, or epidermal growth factor), salts (such as sodium chloride, calcium, magnesium, and phosphate), buffers (such as HEPES), nucleotides (such as adenosine and thymidine), antibiotics (such as GENTAMYCIN™ drug), trace elements (defined as inorganic compounds usually present at final concentrations in the micromolar range), and glucose or an equivalent energy source. Any other necessary supplements may also be included at appropriate concentrations that would be known to those skilled in the art. The culture conditions, such as temperature, pH, and the like, are those previously used with the host cell selected for expression, and will be apparent to the ordinarily skilled artisan.

(ix) Antibody Purification

[0235] When using recombinant techniques, the antibody can be produced intracellularly, in the periplasmic space, or directly secreted into the medium. If the antibody is produced intracellularly, as a first step, the particulate debris, either host cells or lysed fragments, is removed, for example, by centrifugation or ultrafiltration. Carter et al., Bio/Technology 10:163-167 (1992) describe a procedure for isolating antibodies which are secreted to the periplasmic space of E. coli. Briefly, cell paste is thawed in the presence of sodium acetate (pH 3.5), EDTA, and phenylmethylsulfonylfluoride (PMSF) over about 30 min. Cell debris can be removed by centrifugation. Where the antibody is secreted into the medium, supernatants from such expression systems are generally first concentrated using a commercially available protein concentration filter, for example, an Amicon or Millipore Pellicon ultrafiltration unit. A protease inhibitor such as PMSF may be included in any of the foregoing steps to inhibit proteolysis and antibiotics may be included to prevent the growth of adventitious contaminants.

[0236] The antibody composition prepared from the cells can be purified using, for example, hydroxylapatite chromatography, gel electrophoresis, dialysis, and affinity chromatography, with affinity chromatography being the preferred purification technique. The suitability of protein A as an affinity ligand depends on the species and isotype of any immunoglobulin Fc domain that is present in the antibody. Protein A can be used to purify antibodies that are based on human γ1, γ2, or γ4 heavy chains (Lindmark et al., J. Immunumol. Meth. 62:1-13 (1983)). Protein G is recommended for all mouse isotypes and for human γ3 (Guss et al., EMBO J. 5:15671575 (1986)). The matrix to which the affinity ligand is attached is most often agarose, but other matrices are available. Mechanically stable matrices such as controlled pore glass or poly(styrenedivinyl)benzene allow for faster flow rates and shorter processing times than can be achieved with agarose. Where the antibody comprises a C_{H}3 domain, the Bakerbond ABX™ resin (J. T. Baker, Phillipsburg, N.J.) is useful for purification. Other techniques for protein purification such as fractionation on an ion-exchange column, ethanol precipitation, Reverse Phase HPLC, chromatography on silica, chromatography on heparin SEPRAROSE™ chromatography on an anion or cation exchange resin (such as a polyaspartic acid column), chromatofocusing, SDS-PAGE, and ammonium sulfate precipitation are also available depending on the antibody to be recovered.

[0237] Following any preliminary purification step(s), the mixture comprising the antibody of interest and contaminants may be subjected to low pH hydrophobic interaction chromatography using an elution buffer at a pH between about 2.5-4.5, preferably performed at low salt concentrations (e.g., from about 0-0.25 M salt).

C. Pharmaceutical Formulations

[0238] Therapeutic formulations of the antibody are prepared for storage by mixing the antibody having the desired degree of purity with optional physiologically acceptable carriers, excipients or stabilizers (Remington's Pharmaceutical Sciences 16th edition, Osol, A. Ed. (1980)), in the form of lyophilized formulations or aqueous solutions. Acceptable carriers, excipients, or stabilizers are nontoxic to recipients at the dosages and concentrations employed, and include buffers such as phosphate, citrate, and other organic acids; antioxidants including ascorbic acid and methionine; preservatives (such as octadecyidimethylbenzyl ammonium chloride; hexamethonium chloride; benzalkonium chloride, benzethonium chloride; phenol, butyl or benzyl alcohol; alkyl parabens such as methyl or propyl paraben; catechol; resorcinol; cyclohexanol; 3-pentanol; and m-cresol); low molecular weight (less than about 10 residues) polypeptide; proteins, such as serum albumin, gelatin, or immunoglobulins; hydrophilic polymers such as polyvinylpyrrolidone; amino acids such as glycine, glutamine, asparagine, histidine, arginine, or lysine; monosaccharides, disaccharides, and other carbohydrates including glucose, mannose, or dextrins; chelating agents such as EDTA; sugars such as sucrose, mannitol, trehalose or sorbitol; salt-forming counter-ions such as sodium; metal: complexes (e.g., Zn-protein complexes); and/or non-ionic surfactants such as TWEEN™, PLURONICS™ or polyethylene glycol (PEG).

[0239] The formulation herein may also contain more than one active compound as necessary for the particular indication being treated, preferably those with complementary activities that do not adversely affect each other. For example, it may be desirable to further provide an immunosuppressive agent. Such molecules are suitably present in combination in amounts that are effective for the purpose intended.

[0240] The active ingredients may also be entrapped in microcapsule prepared, for example, by coacervation techniques or by interfacial polymerization, for example, hydroxymethylcellulose or gelatin-microcapsule and poly-(methylmethacylate) microcapsule, respectively, in colloidal drug delivery systems (for example, liposomes, albumin microspheres, microemulsions, nano-particles and nanocapsules) or in macroemulsions. Such techniques are disclosed in Remington's Pharmaceutical Sciences 16th edition, Osol, A. Ed (1980).

[0241] The formulations to be used for in vivo administration must be sterile. This is readily accomplished by filtration through sterile filtration membranes.

[0242] Sustained-release preparations may be prepared. Suitable examples of sustained-release preparations include semipermeable matrices of solid hydrophobic polymers containing the antibody, which matrices are in the form of shaped articles, e.g., films, or microcapsule. Examples of sustained-release matrices include polyesters, hydrogels (for example, poly(2-hydroxyethyl-methacrylate), or poly(vinylalcohol)), polylactides (U.S. Pat. No. 3,773,919), copolymers of L-glutamic acid and γ ethyl-L-glutamate, non-degradable ethylene-vinyl acetate, degradable lactic acid-glycolic acid copolymers such as the LUPRON DEPOT™ (injectable microspheres composed of lactic acid-glycolic acid copolymers and leuprolide acetate), and poly-D-(−)-3-hydroxybutyric acid. While polymers such as ethylene-vinyl acetate and lactic acid-glycolic acid enable release of molecules for over 100 days, certain hydrogels release proteins for shorter time periods. When encapsulated antibodies remain in the body for a long time, they may denature or aggregate as a result of exposure to moisture at 37° C., resulting in a loss of biological activity and possible changes in immunogenicity. Rational strategies can be devised for stabilization depending on the mechanism involved. For example, if the aggregation mechanism is discovered to be intermolecular S—S bond formation through thio-disulfide interchange, stabilization may be achieved by modifying sulfhydryl residues, lyophilizing from acidic solutions, controlling moisture content, using appropriate additives, and developing specific polymer matrix compositions.

D. Non-Therapeutic Uses for the Antibody

[0243] The antibodies of the invention may be used as affinity purification agents. In this process, the antibodies are immobilized on a solid phase such a Sephadex resin or filter paper, using methods well known in the art. The immobilized antibody is contacted with a sample containing the antigen to be purified, and thereafter the support is washed with a suitable solvent that will remove substantially all the material in the sample except the antigen to be purified, which is bound to the immobilized antibody. Finally, the support is washed with another suitable solvent, such as glycine buffer, pH 5.0, that will release the antigen from the antibody.

[0244] The antibodies of this invention may also be useful in diagnostic assays, e.g., for detecting expression of an antigen of interest in specific cells, tissues, or serum.

[0245] For diagnostic applications, the antibody typically will be labeled with a detectable moiety. Numerous labels are available which can be generally grouped into the following categories:

[0246] (a) Radioisotopes, such as ³⁵S, ¹⁴C, ¹²⁵I, ³H, and ¹³¹I. The antibody can be labeled with the radioisotope using the techniques described in Current Protocols in Immunology, Volumes 1 and 2, Coligen et al., Ed. Wiley-Interscience, New York, N.Y., Pubs. (1991) for example and radioactivity can be measured using scintillation counting.

[0247] (b) Fluorescent labels such as rare earth chelates (europium chelates) or fluorescein and its derivatives, rhodamine and its derivatives, dansyl, Lissamine, phycoerythrin and Texas Red are available. The fluorescent labels can be conjugated to the antibody using the techniques disclosed in Current Protocols in Immunology, supra, for example. Fluorescence can be quantified using a fluorimeter.

[0248] (c) Various enzyme-substrate labels are available and U.S. Pat. No. 4,275,149 provides a review of some of these. The enzyme generally catalyzes a chemical alteration of the chromogenic substrate which can be measured using various techniques. For example, the enzyme may catalyze a color change in a substrate, which can be measured spectrophotometrically. Alternatively, the enzyme may alter the fluorescence or chemiluminescence of the substrate. Techniques for quantifying a change in fluorescence are described above. The chemiluminescent substrate becomes electronically excited by a chemical reaction and may then emit light which can be measured (using a chemiluminometer, for example) or donates energy to a fluorescent acceptor. Examples of enzymatic labels include luciferases (e.g., firefly luciferase and bacterial luciferase; U.S. Pat. No. 4,737,456), luciferin, 2,3-dihydrophthalazinediones, malate dehydrogenase, urease, peroxidase such as horseradish peroxidase (HRPO), alkaline phosphatase, β-galactosidase, glucoamylase, lysozyme, saccharide oxidases (e.g., glucose oxidase, galactose oxidase, and glucosephosphate dehydrogenase), heterocyclic oxidases (such as uricase and xanthine oxidase), lactoperoxidase, microperoxidase, and the like. Techniques for conjugating enzymes to antibodies are described in O'Sullivan et al., Methods for the Preparation of Enzyme-Antibody Conjugates for use in Enzyme Immunoassay, in Methods in Enzym. (ed J. Langone & H. Van Vunakis), Academic press, New York, 73:147-166 (1981).

[0249] Examples of enzyme-substrate combinations include, for example:

[0250] (i) Horseradish peroxidase (HRPO) with hydrogen peroxidase as a substrate, wherein the hydrogen peroxidase oxidizes a dye precursor (e.g., orthophenylene diamine (OPD) or 3,3′,5,5′-tetramethyl benzidine hydrochloride (TMB));

[0251] (ii) alkaline phosphatase (AP) with para-Nitrophenyl phosphate as chromogenic substrate; and

[0252] (ii) β-D-galactosidase (β-D-Gal) with a chromogenic substrate (e.g., p-nitrophenyl-β-D-galactosidase) or fluorogenic substrate 4-methylumbelliferyl-β-D-galactosidase.

[0253] Numerous other enzyme-substrate combinations are available to those skilled in the art. For a general review of these, see U.S. Pat. Nos. 4,275,149 and 4,318,980.

[0254] Sometimes, the label is indirectly conjugated with the antibody. The skilled artisan wilt be aware of various techniques for achieving this. For example, the antibody can be conjugated with biotin and any of the three broad categories of labels mentioned above can be conjugated with avidin, or vice versa. Biotin binds selectively to avidin and thus, the label can be conjugated with the antibody in this indirect manner. Alternatively, to achieve indirect conjugation of the label with the antibody, the antibody is conjugated with a small hapten (e.g., digoxin) and one of the different types of labels mentioned above is conjugated with an anti-hapten antibody (e.g., anti-digoxin antibody). Thus, indirect conjugation of the label with the antibody can be achieved.

[0255] In another embodiment of the invention, the antibody need not be labeled, and the presence thereof can be detected using a labeled antibody which binds to the antibody.

[0256] The antibodies of the present invention may be employed in any known assay method, such as competitive binding assays, direct and indirect sandwich assays, and immunoprecipitation assays. Zola, Monoclonal Antibodies: A Manual of Techniques, pp. 147-158 (CRC Press, Inc. 1987).

[0257] Competitive binding assays rely on the ability of a labeled standard to compete with the test sample analyze for binding with a limited amount of antibody. The amount of antigen in the test sample is inversely proportional to the amount of standard that becomes bound to the antibodies. To facilitate determining the amount of standard that becomes bound, the antibodies generally are insolubilized before or after the competition, so that the standard and analyze that are bound to the antibodies may conveniently be separated from the standard and analyze which remain unbound.

[0258] Sandwich assays involve the use of two antibodies, each capable of binding to a different immunogenic portion, or epitope, of the protein to be detected. In a sandwich assay, the test sample analyze is bound by a first antibody which is immobilized on a solid support, and thereafter a second antibody binds to the analyze, thus forming an insoluble three-part complex. See, e.g., U.S. Pat. No. 4,376,110. The second antibody may itself be labeled with a detectable moiety (direct sandwich assays) or may be measured using an anti-immunoglobulin antibody that is labeled with a detectable moiety (indirect sandwich assay). For example, one type of sandwich assay is an ELISA assay, in which case the detectable moiety is an enzyme.

[0259] For immunohistochemistry, the tumor sample may be fresh or frozen or may be embedded in paraffin and fixed with a preservative such as formalin, for example.

[0260] The antibodies may also be used for in vivo diagnostic assays. Generally, the antibody is labeled with a radionuclide (such as ¹¹¹In, ⁹⁹ Tc, ¹⁴C, ¹³¹I, ¹²⁵I, ³H, ³²P or ³⁵S) or a dye so that the tumor can be localized using immunoscintiography.

[0261] In one embodiment, a method of detecting VEGF in a biological sample (e.g., tissue, blood, sera, spinal fluid) or a prepared biological sample can comprise the step of contacting an antibody of this invention with the sample and observing the anti-VEGF antibody bound to the VEGF in the sample or determining the amount of the anti-VEGF antibody bound to VEGF in the sample. In another embodiment, a method of detecting VEGF in a subject comprises the step of administering an antibody of this invention to the subject and observing the anti-VEGF antibody bound to the VEGF in the subject or determining the amount of the anti-VEGF antibody bound to VEGF in the subject (e.g., human, mouse, rabbit, rat, etc).

E. Diagnostic Kits

[0262] As a matter of convenience, the antibody of the present invention can be provided in a kit, i.e., a packaged combination of reagents in predetermined amounts with instructions for performing the diagnostic assay. Where the antibody is labeled with an enzyme, the kit will include substrates and cofactors required by the enzyme (e.g., a substrate precursor which provides the detectable chromophore or fluorophore). In addition, other additives may be included such as stabilizers, buffers (e.g., a block buffer or lysis buffer) and the like. The relative amounts of the various reagents may be varied widely to provide for concentrations in solution of the reagents which substantially optimize the sensitivity of the assay. Particularly, the reagents may be provided as dry powders, usually lyophilized, including excipients which on dissolution will provide a reagent solution having the appropriate concentration.

F. In Vivo Uses for the Antibody

[0263] It is contemplated that the antibody of the present invention may be used to treat a mammal. In one embodiment, the antibody is administered to a nonhuman mammal for the purposes of obtaining preclinical data, for example. Exemplary nonhuman mammals to be treated include nonhuman primates, dogs, cats, rodents and other mammals in which preclinical studies are performed. Such mammals may be established animal models for a disease to be treated with the antibody or may be used to study toxicity of the antibody of interest. In each of these embodiments, dose escalation studies may be performed in the mammal. Where the antibody is an anti-VEGF antibody, it may be administered to a host rodent in a solid tumor model, for example.

[0264] In addition, or in the alternative, the antibody is used to treat a human, e.g. a patient suffering from a disease or disorder who could benefit from administration of the antibody. The conditions which can be treated with the antibody are many and include conditions arising from or exacerbated by abnormal angiogenesis, e.g., by excessive, inappropriate or uncontrolled angiogenesis. For example, such conditions include, cancer such as colorectal cancer and NSCLS and others described above and inflammatory diseases such as rheumatoid arthritis and others described above.

[0265] The following references describe lymphomas and CLL, their diagnoses, treatment and standard medical procedures for measuring treatment efficacy. Canellos G P, Lister, T A, Sklar J L: The Lymphomas. W.B. Saunders Company, Philadelphia, 1998; van Besien K and Cabanillas, F: Clinical Manifestations, Staging and Treatment of Non-Hodgkin's Lymphoma, Chap. 70, pp 1293-1338, in: Hematology, Basic Principles and Practice, 3rd ed. Hoffman et al. (editors). Churchill Livingstone, Philadelphia, 2000; and Rai, K and Patel, D: Chronic Lymphocytic Leukemia, Chap. 72, pp 1350-1362, in: Hematology, Basic Principles and Practice, 3rd ed. Hoffman et al. (editors). Churchill Livingstone, Philadelphia, 2000.

[0266] The parameters for assessing efficacy or success of treatment of an autoimmune or autoimmune related disease will be known to the physician of skill in the appropriate disease. Generally, the physician of skill will look for reduction in the signs and symptoms of the specific disease. The following are by way of examples.

[0267] In one embodiment, the methods and compositions of the invention are useful to treat rheumatoid arthritis. RA is characterized by inflammation of multiple joints, cartilage loss and bone erosion that leads to joint destruction and ultimately reduced joint function. Additionally, since RA is a systemic disease, it can have effects in other tissues such as the lungs, eyes and bone marrow.

[0268] The VEGF binding antibodies can be used as first-line therapy in patients with early RA (i.e., methotrexate (MTX) naive), or in combination with, e.g., MTX or cyclophosphamide. Or, the antibodies can be used in treatment as second-line therapy for patients who were DMARD and/or MTX refractory, in combination with, e.g., MTX. In one preferred embodiment, the VEGF binding antibodies of this invention are administered to mammals who are DMARD and/or MTX refractory. The anti-VEGF antibodies are useful to prevent and control joint damage, delay structural damage, decrease pain associated with inflammation in RA, and generally reduce the signs and symptoms in moderate to severe RA. The RA patient can be treated with the anti-VEGF antibodies of this invention prior to, after or together with treatment with other drugs used in treating RA (see combination therapy below). In one embodiment, patients who had previously failed disease-modifying antirheumatic drugs and/or had an inadequate response to methotrexate alone are treated with an anti-VEGF binding antibody. In another embodiment, the patients are administered an anti-VEGF antibody of this invention plus cyclophosphamide or anti-VEGF binding antibody plus methotrexate.

[0269] One method of evaluating treatment efficacy in RA is based on American College of Rheumatology (ACR) criteria, which measures the percentage of improvement in tender and swollen joints, among other things. The RA patient can be scored at for example, ACR 20 (20 percent improvement) compared with no antibody treatment (e.g., baseline before treatment) or treatment with placebo. Other ways of evaluating the efficacy of antibody treatment include X-ray scoring such as the Sharp X-ray score used to score structural damage such as bone erosion and joint space narrowing. Patients can also be evaluated for the prevention of or improvement in disability based on Health Assessment Questionnaire [HAQ] score, AIMS score, SF-36 at time periods during or after treatment. The ACR 20 criteria may include 20% improvement in both tender (painful) joint count and swollen joint count plus a 20% improvement in at least 3 of 5 additional measures:

1. patient's pain assessment by visual analog scale (VAS),

2. patient's global assessment of disease activity (VAS),

3 physician's global assessment of disease activity (VAS),

4. patient's self-assessed disability measured by the Health Assessment Questionnaire, and

5. acute phase reactants, CRP or ESR.

[0270] The ACR 50 and 70 are defined analogously. Preferably, the patient is administered an amount of anti-VEGF binding antibody of the invention alone or in combination with other agents for treating rheumatoid arthritis effective to achieve at least a score of ACR 20, preferably at least ACR 30, more preferably at least ACR50, even more preferably at least ACR70, most preferably at least ACR 75 and higher.

[0271] Psoriatic arthritis has unique and distinct radiographic features. For psoriatic arthritis, joint erosion and joint space narrowing can be evaluated by the Sharp score as well. The anti-VEGF binding antibodies disclosed herein can be used to prevent the joint damage as well as reduce disease signs and symptoms of the disorder.

[0272] The antibody is administered by any suitable means, including parenteral, subcutaneous, intraperitoneal, intrapulmonary, and intranasal, and, if desired for local immunosuppressive treatment, intralesional administration. Parenteral infusions include intramuscular, intravenous, intraarterial, intraperitoneal, or subcutaneous administration. In addition, the antibody is suitably administered by pulse infusion, particularly with declining doses of the antibody. Preferably the dosing is given by injections, most preferably intravenous or subcutaneous injections, depending in part on whether the administration is brief or chronic.

[0273] For the prevention or treatment of disease, the appropriate dosage of antibody will depend on the type of disease to be treated, the severity and course of the disease, whether the antibody is administered for preventive or therapeutic purposes, previous therapy, the patient's clinical history and response to the antibody, and the discretion of the attending physician. The antibody is suitably administered to the patient at one time or over a series of treatments.

[0274] Depending on the type and severity of the disease, about 1 μg/kg to 15 mg/kg (e.g., 0.1-20 mg/kg) of antibody is an initial candidate dosage for administration to the patient, whether, for example, by one or more separate administrations, or by continuous infusion. A typical daily dosage might range from about 1 μg/kg to 100 mg/kg or more, depending on the factors mentioned above. For repeated administrations over several days or longer, depending on the condition, the treatment is sustained until a desired suppression of disease symptoms occurs. However, other dosage regimens may be useful. The progress of this therapy is easily monitored by conventional techniques and assays. An exemplary dosing regimen for an anti-LFA-1 or anti-ICAM-1 antibody is disclosed in WO 94/04188. Exemplary dosing regimens and therapeutic combinations for treating cancer can be found in U.S. Provisional Application No. 60/474,480, filed May 30, 2003.

[0275] The antibody composition will be formulated, dosed, and administered in a fashion consistent with good medical practice. Factors for consideration in this context include the particular disorder being treated, the particular mammal being treated, the clinical condition of the individual patient, the cause of the disorder, the site of delivery of the agent, the method of administration, the scheduling of administration, and other factors known to medical practitioners. The “therapeutically effective amount” of the antibody to be administered will be governed by such considerations, and is the minimum amount necessary to prevent, ameliorate, or treat a disease or disorder. The antibody need not be, but is optionally formulated with one or more agents currently used to prevent or treat the disorder in question. The effective amount of such other agents depends on the amount of antibody present in the formulation, the type of disorder or treatment, and other factors discussed above. These are generally used in the same dosages and with administration routes as used hereinbefore or about from 1 to 99% of the heretofore employed dosages. Generally, alleviation or treatment of a disease or disorder involves the lessening of one or more symptoms or medical problems associated with the disease or disorder. In the case of cancer, the therapeutically effective amount of the drug can accomplish one or a combination of the following: reduce the number of cancer cells; reduce the tumor size; inhibit (i.e., to decrease to some extent and/or stop) cancer cell infiltration into peripheral organs; inhibit tumor metastasis; inhibit, to some extent, tumor growth; and/or relieve to some extent one or more of the symptoms associated with the cancer. To the extent the drug may prevent growth and/or kill existing cancer cells, it may be cytostatic and/or cytotoxic. In some embodiments, a composition of this invention can be used to prevent the onset or reoccurrence of the disease or disorder in a subject or mammal.

G. Articles of Manufacture

[0276] In another embodiment of the invention, an article of manufacture containing materials useful for the treatment of the disorders described above is provided. The article of manufacture comprises a container and a label. Suitable containers include, for example, bottles, vials, syringes, and test tubes. The containers may be formed from a variety of materials such as glass or plastic. The container holds a composition which is effective for treating the condition and may have a sterile access port (for example the container may be an intravenous solution bag or a vial having a stopper pierceable by a hypodermic injection needle). The active agent in the composition is the antibody. The label on, or associated with, the container indicates that the composition is used for treating the condition of choice. The article of manufacture may further comprise a second container comprising a pharmaceutically-acceptable buffer, such as phosphate-buffered saline, Ringer's solution and dextrose solution. It may further include other materials desirable from a commercial and user standpoint, including other buffers, diluents, filters, needles, syringes, and package inserts with instructions for use.

[0277] Incorporated by reference in their entirety are United States Provisional Applications from which this application claims benefit: U.S. Ser. No. 60/491,877, filed Aug. 1, 2003; U.S. Ser. No. 60/516,495, filed Nov. 1, 2003; U.S. Ser. No. 60/570,912, filed May 12, 2004; U.S. Ser. No. 60/571,239, filed May 13, 2004; U.S. Ser. No. 60/576,315, filed Jun. 1, 2004; and U.S. Ser. No. 60/580,757, filed Jun. 18, 2004.

[0278] The following examples are intended merely to illustrate the practice of the present invention and are not provided by way of limitation. The disclosures of all patent and scientific literatures cited herein are expressly incorporated in their entirety by reference.

### EXAMPLES

Generation of the Synthetic Antibody Phage Libraries

[0279] In general, two types of combinatorial antibody libraries have been developed, distinguished by the source of repertoires. Most libraries to date are “natural” antibody libraries which used the natural repertoires as the source for its diversity, where the genes as message RNA of immune cells from naïve or immunized animals or human were amplified and cloned into vector for phage display or other display technology, such as ribosome or yeast display. The natural antibodies usually have multiple frameworks, which together with variable CDRs sequences and the recombination of light chain and heavy chain made up the diversity of the library. The size of the library determined the performance of the libraries since the repertoires were in general larger than the library size (marks et al). The synthetic library, on the other hand, is a new branch of library where the diversity is designed and built into the library with synthetic DNA. Single or multiple frameworks have been used. For single framework library, the source of the diversity solely depends on the degeneracy of synthetic DNA designed to create the diverse CDR loops. Both the diversity design and the size of the libraries are critical for the library performance, which can be measured by the affinity of the antibodies found from the libraries.

[0280] We developed a strategy of building synthetic antibody phage library upon the template of a single framework. Residues were selected from CDR loops that are either solvent exposed or highly variable in natural antibodies repertoires according to Kabat database and were randomized by mimicking the natural diversity using tailored codons. We also explored restricting the randomization to heavy chain, which often contribute to the main binding interaction with antigen among natural antibodies, and found it was sufficient to fund binders to naïve targets. One of the reasons to restrict the diversity is so that the gap between the DNA degeneracy and practical phage library size is not overwhelmingly large and the sequence space will be covered at sufficient density.

[0281] The first library was built on humanized 4D5 framework with a randomized heavy chain and fixed light chain in the format of single chain Fv (ScFv). To the target antigen murine VEGF (mVEGF), many unique binders were found.

[0282] The libraries were then generally further improved by fine-tuning the diversity of CDR-H1 and H2 or the light chain to closely mimic the natural diversity, and by exploring the diversity design of CDR-H3 in the Fab format of display. See FIG. 1 for illustrations of different types of antibody libraries. We found libraries with different designs of CDR-H3 of similar size resulted in binders of hVEGF and mVEGF with sub-nM affinity. The affinity of these binders can be further improved to pM range by a second step of randomizing their light chain CDRs.

[0283] For details of strategies and methods for generating synthetic antibody libraries with single template, see, for example, U.S. provisional application U.S. Ser. No. 60/385,338 (filed Jun. 3, 2002), the entire disclosure of which is expressly incorporated herein by reference. Thus, novel antibodies with high affinity to both human VEGF and mouse VEGF could be found in diverse synthetic antibody phage libraries based on a single framework template.

### Example 1

### G6 and B20 Derived Antibodies

[0284] (a) Selection of High Affinity Anti-VEGF Fab Clones

[0285] The selection procedures for high affinity anti-VEGF Fab clones consisted of various combinations of solid-supported and solution-binding sortings. In solid-supported sortings, the antibody phage library was panned with target antigen coated on NUNC 96-well Maxisorp immunoplate at concentration of 5 ug/ml. In solution-binding sorting method, phage library was incubated with decreasing concentration of biotinylated antigen in solution, which then was captured by neutravidin coated on the 96-well Maxisorp plate (2-5 ug/ml). Decreasing concentration allowed more stringency in panning to fish for tighter binders. To the target antigen mVEGF, a two-step sorting strategy was developed such that, in step 1, potent binders were isolated from naïve libraries by means of the solid-supported selection, and subsequently in step 2, those stronger affinity binders could be isolated from weaker ones by the progressive solution-binding method with decreasing target antigen concentration. To quickly screen out these binders, the high throughput single-spot competition binding ELISA was used. Low amount of mVEGF (25 nM) was applied in this assay to screen 16 clones from each library after the 3^{rd} round sorting.

[0286] As the result of combining solid-supported and solution-binding sortings, three Fab clones, G6, B29, and C3, all from NNK library, were identified as high affinity binders. And after the 5^{th} round sorting, the whole library was dominated by G6 clone. Interestingly, B20, which came from NVT library, was found by solution-binding sorting alone. This suggested that more clones can be found by different strategies of sorting methods, which may bias for different clones. With different library designs, more VEGF binding clones with distinct sequences should be identified also. The four unique clones with distinct sequences were first characterized for their binding affinity to murine and human VEGF using competition-binding ELISA at 25° C. IC50 data from phage binding assays represent an estimation of their affinities, and G6 was identified as the highest affinity binder with IC50 at 0.5-1 nM for both human and murine VEGF (FIG. 2).

[0287] (b) Activities and Properties

[0288] A series of in vitro assays were conducted to examine properties and activities of the selected novel anti-VEGF antibodies.

Epitope Blocking Assay

[0289] First, the antibody phage clones were examined for their possible binding epitopes on VEGF. A phage-blocking assay was used, wherein the bindings of the phage clones (at constant concentration) to mVEGF-coated wells were measured in the presence of either a full extracellular domain (ECD) of KDR or a second domain of Flt-1 (Flt-1_{D2}), both at increasing concentrations, respectively. Full ECD of KDR or Flt-1 has seven immunoglobulin-like domains, and binds VEGF through the second and third domain. The second domain of Flt-1 alone can bind VEGF at Kd of 2 nM with known epitopes on VEGF, based on the published crystal structure the VEGF-VEGFR complex (Wiesmann et al. (1997) Cell 91:695-704). The Kd of KDR ECD binding to VEGF is about 5 nM. We expected that the bindings of the phage clones to be reduced with the increasing addition of receptors, if the epitopes for an antibody on phage overlap significantly with receptor.

[0290] For receptor blocking assay at protein level with purified Fab expressed from E. coli, (mouse or human VEGF), VEGF receptor immobilized plate by coating baculovirus expressed Flt-1 ECD fragment (Ig domain1-5) (Flt-1_{D1-5}) directly, or 293 cell-expressed KDR-Ig fusion, which present KDR ECD (Ig domain 1-7) as Fcγ fusion captured with goat anti-human IgG Fcγ (Jackson ImmunoResearch Lab. West Grove, Pa.) coated on the 96-well Maxisorp immunoplate and blocked with 0.5% BSA and 0.02% Tween20. Biotinylated bacterially expressed hVEGF or mVEGF at 0.2 nM was first incubated with three-fold serial diluted anti-VEGF Fabs, G6, Fab-12 (the Fab of the Avastin™ antibody), or Y0317 in PBS with 0.05% Tween 20 (PBST). After 1 h incubation at room temperature, the mixtures were transferred to a VEGF receptor immobilized plate and incubated for 10 min. The VEGF-A that was not blocked by anti-VEGF was captured with VEGF receptor coated wells and detected by streptavidin-HRP conjugate and developed with TMB substrate as described above.

[0291] As shown in FIG. 3, the four clones were blocked to different extents by Flt-1_{D2} and KDR. The results of the blocking assay suggested that these four clones might have different binding epitopes on VEGF that are nonetheless overlapped with receptor binding epitope. The affinities of the antibody clones did not correlate with the efficiency of blocking by receptor in this blocking assay. Y0959, a phage clone with known epitope was used as a control. Among the four novel clones, G6 and B20 appeared to have epitopes that sufficiently overlapped with those for both Fit-1 and KDR, since their bindings to mVEGF was significantly reduced in the presence of the receptor fragments. The difference in the blocking efficient is small but has been consistent with multiple assays. One prediction is that G6 or B20 has epitopes that matches with those of receptor on VEGF much better than Fab-12 or its variants, Y0317 and Y0959 (Muller, Y. A., et al., (1998) Structure 6:1153-1167). Therefore, we proceeded to generate Fab protein to confirm the binding and examine the epitope. G6 was chosen first for further study since it has the highest affinity against both mVEGF and hVEGF.

Binding; Specificity and Neutralizing Activity

[0292] To determine the binding specificity of G6 Fab clone, ELSA assays were conducted using human, mouse, rat and rabbit VEGF-A₁₆₅ as well as VEGF homologs including mouse and human placenta growth factor (PIGF-2), mVEGF-D and human VEGF-B. Human and murine placental growth factor (PIGF-2), murine VEGF-D, rat VEGF-A and human VEGF-B were from R&D system. The tested antigens were coated on NUNC 96-well Maxisorp immunoplate at the concentration of 2 ug/ml. Binding with increasing concentrations of G6 Fab protein was measured by Protein G-horse radish peroxidase conjugate and substrate. For example, Fab protein was prepared from E. coli harboring the plasmid of G6 Fab expression construct under the promoter of alkaline phosphatase and secretion leader sequences stII and purified with Protein G affinity column. G6 Fab binding to VEGF and its homologs were measured by direct ELISA. VEGF homolog-coated wells (at 2 ug/ml in PBS concentration) were blocked with 0.5% BSA and 0.05% Tween20 at 25° C. Fab at increasing concentrations were incubated with the VEGF homolog-coated wells for 1 h at 25° C. and measured with anti-human Fab antibody horse radish peroxidase conjugate diluted in PBT buffer, then developed with TMB substrate. Solution binding assays were also carried out for some proteins by incubating 0.5 nM of G6 Fab with increasing concentrations of a VEGF homolog for 1-2 h at 25° C., and the unbound Fab was captured with mVEGF-A coated wells and measured. As shown in FIG. 4, the G6 Fab protein binds equally well to both mVEGF and hVEGF (approximately 0.6 nM and 1.4nM, respectively). Moreover, the G6 antibody did not bind to other VEGF homologs at all, and thus is highly specific to VEGF. The G6 Fab bound rat and rabbit VEGF with similar affinity as for mVEGF (data not shown).

[0293] To test if G6 not only binds to VEGF at high affinity, but also is capable of effectively blocking VEGFs binding to VEGF receptors, blocking assays were conducted, wherein either hVEGF or mVEGF was tested for its binding to KDR in the presence of increasing concentrations of the G6 Fab clone. Also used as control were the two anti-hVEGF antibodies, Fab-12 (the Fab of Avastin™) and Y0317, that are capable of effectively blocking hVEGF but neither bind to mVEGF nor block its activities. As shown in FIG. 5, G6 effectively blocked hVEGF's binding to KDR with an efficacy similar to that of Fab-12 or Y0317. Furthermore, G6 can also significantly block mVEGFs binding to KDR. In comparison, neither Fab-12 nor Y0317 showed any blocking effect on mVEGF.

[0294] Thus, the novel anti-VEGF antibody G6 of this invention is a high affinity anti-VEGF antibody capable of binding and blocking VEGF from both human and murine species.

Cell-Based Assay

[0295] To further determine binding specificity and blocking activities of the novel antibody G6, a cell-based assay using human umbilical vein endothelial cells (HUVECs) was conducted, wherein various anti-VEGF antibodies were tested for their abilities to block either human or murine VEGF induced cell proliferation. Basically, 96-well tissue culture plates were seeded with 3000 HuVECs per well and fasted in the assay medium (F12:DMEM 50:50 supplemented with 1.5% (v/v) diafiltered fetal bovine serum) for 24 hours. The concentration of VEGF used for stimulating the growth of cells was determined by first titrating to identify the amount of VEGF that can induce 90% of maximal DNA synthesis. Fresh assay medium with fixed amounts of VEGF (0.1 nM final concentration) and increasing concentrations of anti-VEGF Fab were then added. After 24 hours of incubation, cells were pulsed with 0.5 μCi per well of [³H]thymidine for 24 hours, and then harvested on to 96-well filter plate for counting by a TopCount gamma counter. Here the DNA synthesis was measured by incorporation of tritiated thymidine. In this assay, the anti-VEGF antibodies serving as the control were Fab-12 and Y0317.

[0296] As shown in FIG. 6, G6 antibody significantly reduced both hVEGF and mVEGFs abilities to promote HUVEC proliferation. The basic fibroblast growth factor (bFGF) experiment here served as a control to demonstrate that none of the anti-VEGF Fabs used in this assay had any non-specific toxicity to the host cells.

[0297] (c) Affinity Improvement of the G6 and B20 Anti-VEGF Antibodies Two novel antibody clones, G6 and B20, were chosen for further improvement on binding affinities. To improve affinity, several selected residues of the light chain CDR were randomized, since both clones came from a library with only randomized heavy chain and a fixed light chain. Surface exposed CDR residues and residues that are highly diverse in the Kabat database of natural antibody sequences were chosen. Site-directed mutagenesis was used with tailored degenerate codons to generate amino acid diversity that mimicked the natural immune repertoire at each CDR site on light chain (FIG. 7). Sorting was first performed by adding the library on immobilized hVEGF or mVEGF on the Maxisorp 96-well plate to maximize the recovery of binders, followed by solution sorting with decreasing concentration of biotinylated hVEGF or mVEGF as two separate tracks of selection. Concentration of biotinylated VEGF was selected based on the initial affinity of the clone to gauge the pressure of the sorting. The selection pressure was also increased by incubating phage binders with 1000 fold excess of un-biotinylated antigen in solution for different length of time at different temperature after initial incubation of the phage library with biotinylated VEGF and before capturing by neutravidin coated on 96-well Maxisorp plate.

[0298] As an example of the above-described processes, G6 having 1 nM affinity was subject to further affinity improvement. The first round of sorting used solid-supported method to capture all clones that still bound VEGF, and then at the second round of sorting, the phage library was incubated with 1 nM of VEGF. Next, the solution-binding used 1 nM biotinylated hVEGF to select most binders. Before capturing, 1 uM unbiotinylated hVEGF was added and incubated at RT for 15 min to compete off fast off-rate binders. Then in the following rounds of sorting (3^{rd} and 4^{th}), more selection pressure was put into solution sorting by using less biotinylated hVEGF (0.1 nM) to select and 100 nM unbiotinylated hVEGF at 37° C. for 30 min or longer time (2 hr or 6 hr) to compete off high off-rate binders and fish for low off-rate binders.

[0299] The same strategy was utilized to improve B20 clone, except that less stringent condition was used because of its low affinity against hVEGF (IC50˜150 nM). The mVEGF selection track followed the same procedures and conditions as what were used with hVEGF. Enrichment was calculated by the eluted phage titers ratio to selection without biotinylated target. After sorting, high throughput single-spot competition binding ELISA as described above was used to quickly screen for improved affinity clones.

[0300] In this assay, low amount of hVEGF or mVEGF (10 nM) was applied to screen 51 clones from G6-based phage library and 110 clones from B20-based phage library with the control of wild type G6 and B20 binders. Several improved G6 clones, collectively termed G6-11 variants, were selected out and showed remarkably increased binding affinity to both human and murine VEGF by over one hundred fold by comparing the phage IC50 values with wild-type clones (FIG. 7). Clones with many unique sequences were found that have improved affinity, which suggested that there are many light chains that can accommodate the heavy chain of the selected clones. It is also interesting to note that binding specificities of some clones were changed. This suggests that light chain is able to modulate the interaction of heavy chain with its antigen sufficiently to alter its specificities. As for the clone sequences, most C6-II clones were different from G6 only in their third light chain CDR (CDR-L3).

[0301] To generate Fab protein or IgG protein for affinity and activity assays, we cloned the variable region into a Fab expression plasmid for expression in an E. coli or a mammalian cell (a phagemid vector that had been modified by deleting the sequence encoding the C-terminal domain of phage coat protein p3 and adding a termination sequence for ribosome binding about 20 nucleotides downstream from the stop codon at the end of heavy chain first constant domain). Fab protein was generated by growing transformed 34B8 E. coli cells in AP5 media at 30° C. for 24 h as described (Presta, L et al., (1997) Cancer Res 57:4593-4599). IgG was purified with Protein A columns and Fab was purified with Protein G affinity chromatography. The production yield for Fab was typically 5-10 mg/L in small scale shake flask growth and 0.5-3 g/L in fermenter growth. IgG production was reasonably high at 10-50 mg/L small scale culture with some clone to clone differences.

[0302] Three G6-II improved clones, G6-8, G6-23 and G6-31 (see FIG. 7 for residue changes in light chain CDRs), were selected to make into Fab protein for affinity measurement, epitope mapping by receptor blocking assay, and activity study in HuVEC growth inhibition assay. For affinity determinations of anti-mVEGF Fabs, we used surface plasmon resonance assays on a BIAcore™-2000 or a BIAcore™-3000 (BIAcore, Inc., Piscataway, N.J.) at 25° C. and 37° C. with immobilized mVEGF or hVEGF CM5 chips at ˜100 response units (RU) as described (Chen, Y., et al., (1999) J. Mol Biol 293:865-881). Briefly, carboxymethylated dextran biosensor chips (CM5, BIAcore Inc.) were activated with N-ethyl-N′-(3-dimethylaminopropyl)-carbodiimide hydrochloride (EDC) and N-hydroxysuccinimide (NHS) according to the supplier's instructions. Human or murine VEGF was diluted with 10 mM sodium acetate, pH 4.8, into 5 ug/ml (˜0.2 uM) before injected at a flow rate of 5 ul/minute to achieve approximately 100 response units. (RU) of coupled protein. Following the injection of 1M ethanolamine to block unreacted groups. For kinetics measurements, two-fold serial dilutions of Fab (100 to 0.78 nM or 3 nM to 500 nM) were injected in PBS with 0.05% Tween 20 (PBST) at 25° C. at a flow rate of approximately 25 ul/min. Association rates (kₒₙ) and dissociation rates (k_{off}) were calculated using a simple one-to-one Langmuir binding model (BIAcore Evaluation Software version 3.2) by simultaneous fitting the association and dissociation sensorgram. The equilibrium dissociation constant (Kd) was calculated as the ratio k_{off}/kₒₙ.

[0303] Since the kₒₙ of affinity improved G6 variants did not result in satisfactory statistics with the available binding model in BIAcore evaluation methods, solution competition binding assays using phage-displayed proteins were also carried out to measure the relative affinity of those antibodies at equilibrium VEGF displayed on phage were incubated with serial dilutions of Fab at room temperature for 20 h to reach equilibrium and the unbound VEGF-phage were captured with G6 Fab briefly (10 min) and measured with anti-M13-HRP and substrate TMB as above. A second format of solution competition binding assay was also carried out where Fab was displayed on phage and interact with dilutions of VEGF to reach equilibrium (20 h) and unbound Fab were captured on VEGF coated 96-well plate and measured as above. The two IC50s values were averaged to get binding affinities as final IC50s. Binding of Fabs to mVEGF were assayed only with second format due to the lack of the reagent of mVEGF displaying phage.

[0304] From initial SPR experiments, it was noted that there was significant kₒₙ improvement. For example, we found that G6-23 had the most significant improvement in on-rate at 25° C. and 37° C. against both human and murine VEGF, and small reduction in off-rate (FIG. 8). The kₒₙ for G6-31 improved as compared to G6 as well (data not shown). Further, the solution competition binding assays confirmed that G6-23 was the most affinity-improved clone with its high affinity of IC50 of 20 pM against hVEGF and mVEGF (FIG. 7).

[0305] Fluorescent quenching assays were also performed to determine the kₒₙ rates of the higher affinity G6 series antibodies. Therefore, three of the affinity matured Fabs (G6-8, G6-23 and G6-31) were purified as Fab proteins, and their affinities for mVEGF were compared to G6 by using and fluorescence quenching in solution for the rate of association (on rate, kₒₙ) (Table 1 and FIGS. 30A and B).

TABLE 1

| | Affinity | | |
|---|---|---|---|
| Clone | kₒₙ (10⁵ M⁻¹ S⁻¹) | K_{off} (10⁻⁴ S⁻¹) | Kd (nM) |
| G6 | 1.75 (1.93) | 1.6 | 0.91 |
| G6-23 | 56.6 | 1.21 | 0.021 |
| G6-31 | 21.6 | 0.35 | 0.016 |
| G6-8 | 16.8 | 1.29 | 0.077 |

[0306] The fluorescence quenching assays were performed as follows. The change of fluorescence intensity in complexing the Fab and VEGF was used to determine the rate of association as developed for the on-rate determination of Fab-12 variants and VEGF (Marvin J. S. and H. B. Loman (2003) Biochemistry 42:7077-7083). We first determined that the fluorescence intensity with an excitation wavelength of 280 nm of G6 (or variants)-VEGF complex was lower than the sum of individual components using an 8000-series SLM-Aminco spectrophometer (Thermo-Spectronic) by adding 100 nM VEGF to a stirred cuvette containing 20 nM Fab in PBS, pH 7.2, at 25° C. Next, increasing concentrations of VEGF (100-400 nM) was mixed with equal volumes of 40 nM Fab in a stop-flow (Aviv Instruments) equipped spectrophometer to observe the rate of the decrease of fluorescence intensity at 25 C. For each experiment, nine measurements were performed for each concentration and fitted to a single-exponential curve. The observed rate was then plotted against VEGF concentrations for pseudo-fast order analysis, and the slope is the rate of association. Two to three independent experiments were carried out and the differences were within 50%.

[0307] The estimated kₒₙ of the improved clones from the SPR method were ˜3-6-fold lower than the measurements by solution-based fluorescence quenching assay, whereas kₒₙ measurements for parent G6 Fab from SPR was statistically sound and within 1.2-fold difference with fluorescence quenching assays. It is possible that using BIAcore SPR technology for fast on-rate measurements was limited by the complex flow dynamics, or there could be some differences in protein behaviors between the parent clone and affinity-improved clones, though aggregation problems were not observed with these proteins. Based on the fluorescence assays, the three Fabs exhibited improvements over G6 in the on-rate by 6, 8 or 20-fold for G6-8, G6-31 or G6-23, respectively. Fab-G6-31 also exhibited an ˜4-fold improvement in the off-rate, and as a result, the affinity of Fab-G6-31 (K_{d}=16 pM) and Fab-G6-23 (K_{d}=21 pM) was ˜40-60-fold improved compared to the G6 parent (K_{d}=910 pM). It was consistent with the solution phase competition assays, which showed a 20-60-fold improvement in IC₅₀ value for G6-31 (30 pM) or G6-23 (10 pM) in comparison with G6 (0.67 nM). We applied the light chain affinity maturation strategy to five other heavy chain sequences and have observed 10- to 30-fold improvements in binding affinities (data not shown). Unlike G6, many improved clones adopted new sequences for all three light chain CDRs. Thus, we found that the three G6 variants increased binding affinity to both human and murine VEGF over G6, predominantly by the increase in the rate of association (on rate or kₒₙ). G6-23 had the highest on rate and then followed by G6-8 and then G6-31. The improvement in the rate of dissociation (off rate or k_{off}) was 2-3 fold for G6-23, and 8 or 13-fold for G6-31 for hVEGF or mVEGF, respectively. Compared to Fab-12 and Y0317, G6 and G6-23 had significantly different binding kinetics (FIG. 32). G6-23 had similar Kd as Y0317 but a faster kinetics with fast on rate of over 10⁶ (M⁻¹ s⁻¹), and moderate rate of dissociation (off rate or k_{off}) at 1-2×10⁻⁴ s⁻¹, whereas Y0317 has slow kₒₙ at 3×10⁴ M⁻¹ s⁻¹, and very slow k_{off} at ˜5×10⁻⁶ s⁻¹ (FIG. 32).

[0308] The solution competition binding assay used biotinylated protein antigens equilibrated with serial dilutions of purified Fab or IgG proteins, and the unbound biotin-antigen was captured with immobilized Fab or IgG coated on Maxisorb plates and was detected with streptavidin conjugated HRP. Alternatively Fab or IgG proteins were equilibrated with serial dilutions of protein antigen, and the unbound Fab or IgG was captured with immobilized antigen and detected with protein A-HRP.

[0309] For the VEGF receptor blocking assay using purified Fab, VEGF receptor was immobilized on a plate by coating Flt-1 ECD fragment (Ig domain 1-5) (Flt-1_{D1-5}) directly, or by first coating with goat anti-human IgG Fcγ (Jackson ImmunoResearch Lab. West Grove, Pa.) and then treating with KDR-IgG fusion receptor which presented KDR ECD (Ig domain 1-7) as a dimer, on a 96-well Maxisorp immunoplate. The plate was then blocked with 0.5% BSA and 0.02% Tween20. Sub-nanomolar concentrations of biotinylated hVEGF or mVEGF at 0.2 nM were incubated with three-fold serial diluted anti-VEGF Fabs, G6, G6-II (G6-8, 23, and 31), Fab-12, or Y0317 in PBST. After 1 h incubation at room temperature, the mixtures were transferred to the plate containing immobilized VEGF receptor and incubated for 10 min. The VEGF-A that was not blocked by anti-VEGF was captured with VEGF receptor coated wells and detected by streptavidin-HRP conjugate and developed with TMB substrate as described above. The results showed that, compared to the original G6, the selected G6-II Fabs indeed have increased blocking activities for both hVEGF and mVEGF. Strong blocking had been observed with both G6 and B20 phage display clones which suggested that their binding epitopes on VEGF overlapped with the epitopes for receptors. G6 Fab was also shown to block the binding of both human and murine VEGF to Flt-1 ECD (FIG. 31) efficiently. In comparison, Fab-12 can only block hVEGF but not mVEGF binding to receptor, consistent with binding specificities. An Fab-12 variant with improved affinity for hVEGF (Kd=20 pM), Y0317, inadvertently acquired some weak affinity to mVEGF (Kd ˜300 nM at 25 C, Y. Chen and H. Lowman unpublished results) and show a slight receptor blocking activity to mVEGF at high concentrations.

[0310] Inhibition of VEGF activity in the endothelial cell growth assay (HuVEC) was performed as described above. Like G6, G6-II specifically inhibited the growth of human umbilical vein endothelial cell stimulated by human and murine VEGF, but not the growth stimulated by human basic fibroblast growth factor (bFGF). The concentration required to inhibit 50% of the growth of the cells stimulated by both human and murine VEGF (HuVEC IC50) correlated well with the affinity measured by BIAcore or solution binding ELISA assay at 37° C. Compared with G6, G6-23 and G6-31 showed at least 100 fold improvement in inhibiting HuVECs growth stimulated by hVEGF or mVEGF. Fab-12 and Y0317 Fabs were also measured in the same assays to serve as controls. Fab-12 showed no measurable binding to mVEGF, whereas Y0317 Fab could bind mVEGF at 350 nM affinity. Therefore, as expected, Y0317 and Fab-12 did not show any inhibitory effects on mVEGF mediated HUVEC growth. We showed that many G6-II variants with different light chain can have improved affinity and the solution-binding assay can also predict the outcome of the potency as inhibitor in HuVEC cell assay.

[0311] VEGF bindings of G6-23 were compared with that of G6 as well as Fab-12. As shown in FIG. 8, G6-23 has significantly improved on-rate for binding to both hVEGF and mVEGF. While the off-rate of G6-23 is substantially similar to that of G6, the overall Kd of G6-23 is at least about 7 fold better than that of G6 for both hVEGF and mVEGF.

### Example 2

### Mapping of VEGF Binding Sites on G6 and G6-23 Antibodies

Functional Mapping of G6 and G6-23 by Shotgun Alanine and Homolog Scanning

[0312] Functional mapping of G6 and G6-23 by shotgun alanine and homolog scanning were performed to identify residues that are important for binding hVEGF and finding residues that can be improved further for binding VEGF. We generated combinatorial phage libraries which allowed heavy chain or light chain CDR residues in separate libraries to be either alanine or wild type (alanine scanning), or either homologous amino acid or wild type (homolog scanning).

Mutagenic Oligonucleotides for Shotgun Scanning Libraries

[0313] The following mutagenic oligonucleotides for shotgun alanine (A)- and homolog (H)-scan library constructions to randomize CDR residues in G6 and G6-23 antibodies were designed using previously described shotgun codons (Vajdos et al. (2002) J. Mol Biol 320:415-428). Equimolar DNA degeneracies are represented in the IUB code (K=G/T, M=A/C, R=A/G, S=G/C, V=A/C/G, W=A/T, Y=C/T), and the degenerate codons are shown in bold text. All the following oligonucleotides were generated by Genentech DNA synthesis group.

| | |
|---|---|
| Oligo | Sequence |

| | |
|---|---|
| H1-A | GCA GCT TCT GGC TTC ACC ATT KCC GMT KMT KSG |
| | ATA CAC TGG GTG CGT CAG |
| | (SEQ ID NO:) |
| H2-A | AAG GGC CTG GAA TGG GTT GCA GST ATT TCT CCT |
| | GST GST GGT KMT ACT KMT TAT GCC GAT AGC GTC |
| | AAG GGC |
| | (SEQ ID NO:) |
| H3-A | ACT GCC GTC TAT TAT TGT GCA CGC KYT GYT KYT |
| | KYT SYT SCA KMT GCT ATG GAC TAC TGG GGT CAA |
| | (SEQ ID NO:) |
| L1-A | ACC TGC CGT GCC AGT SMA GMT GYT KCC RCT GST |
| | GTA GCC TGG TAT CAA CAG AAA C |
| | (SEQ ID NO:) |
| L2-A | CTG AAG CTT CTG ATT KMT KCC GCA TCC KYT CTC |
| | KMT TCT GGA GTC CCT TCT CGC |
| | (SEQ ID NO:) |
| L3-A1 | GCA ACT TAT TAC TGT SMA CAA KCC KMT RCT RCT |
| | CCT SCA ACG TTC GGA CAG GGT ACC |
| | (SEQ ID NO:) |
| L3-A2 | GCA ACT TAT TAC TGT RMA CAA GST KMT GST RMC |
| | CCT KSG ACG TTC GGA CAG GGT ACC |
| | (SEQ ID NO:) |
| H1-H | GCA GCT TCT GGC TTC ACC ATT KCC GAM TWC YKG |
| | ATA CAC TGG GTG CGT CAG |
| | (SEQ ID NO:) |
| H2-H | AAG GGC CTG GAA TGG GTT GCA GST RTT ASC SCA |
| | KCT GST GST TWC ASC TWC TAT GCC GAT AGC GTC |
| | AAG GGC |
| | (SEQ ID NO:) |
| H3-H | ACT GCC GTC TAT TAT TGT GCA CGC TWC RTT TWC |
| | TWC MTC SCA TWC GCT ATG GAC TAC TGG GGT CAA |
| | (SEQ ID NO:) |
| L1-H | ACC TGC CGT GCC AGT SAA GAM RTT KCC ASC KCT |
| | GTA GCC TGG TAT CAA CAG AAA C |
| | (SEQ ID NO:) |
| L2-H | CCG AAG CTT CTG ATT TWC KCC GCA TCC TWC CTC |
| | TWC TCT GGA GTC CCT TCT CGC |
| | (SEQ ID NO:) |
| L3-H1 | GCA ACT TAT TAC TGT VAR VAR KCC TWC ASC ASC |
| | CCT SCA ACG TTC GGA CAG GGT ACC |
| | (SEQ ID NO:) |
| L3-H2 | GCA ACT TAT TAC TGT VAR VAR GST TWC KCT RAC |
| | CCT TKG ACG TTC GGA CAG GGT ACC |
| | (SEQ ID NO:) |

Phagemid Template Vectors for Shotgun Scanning Library Constructions

[0314] (A) Phagemid pV350-2b

[0315] Phagemid pV0350-2b, which was previously used to display h4D5 Fab, a humanized antibody against the extracellular domain (ECD) of EGF-related binding receptor 2 (ErbB2), monovalently on the surface of M13 bacteriophage and contained stop codon (TAA) in all three CDR in heavy chain (hc), served as the template for G6 heavy chain shotgun-scan library construction.

[0316] More specifically, the phagemid pV0350-2b was derived from the pS0643 phagemid. The phagemid vector, pS0643 (also known as phGHam-g3, e.g., U.S. Pat. No. 5,688,666, Example 8), contains pBR322 and fl origins of replication, an ampicillin resistant gene, an E. coli alkaline phosphatase (phoA) promoter (Bass et al., (1990) Proteins 8:309-314), and a sequence encoding a stII secretion signal sequence fused to residues 1-191 of human growth hormone (hGH) and a sequence encoding the C-terminal residues 267-421 of protein III of M13 phage (hereinafter, cP3 or pIII). The pS0643 phagemid also contains an XbaI site and an amber stop codon following residue 191 of hGH. The stII secretion signal sequence can export a protein to the periplasm of a bacteria cell (e.g., a light chain region (LC) of an antibody). The sequence encoding the human growth hormone (hGH) was removed from the pS0643 vector and replaced with a NsiI/XbaI nucleic acid fragment encoding a humanized anti-Her2 Fab fragment (“h4D5” sequence) ligated in frame with the stII secretion signal (humAb4D5-8, see Carter et al., (1992) PNAS 89:4285-4289 therein or U.S. Pat. No. 5,821,337, for sequence). The amber stop codon between the heavy chain fragment and cP3 was deleted, as this modification has been shown to increase the levels of Fab displayed on phage.

[0317] The h4D5 antibody is a humanized antibody that specifically recognizes a cancer-associated antigen known as Her-2 (erbB2). The h4d5 sequence was obtained by polymerase chain reaction using the humAb4D5 version 8 (“humAb4D5-8”) sequence and primers engineered to give rise to a 5′ NsiI site and a 3′ XbaI site in the PCR product (Carter et al., (1992) PNAS 89:4285-4289). The PCR product was cleaved with NsiI and XbaI and ligated into the pS0643 phagemid vector. The h4D5 nucleic sequence encodes modified CDR regions from a mouse monoclonal antibody specific for Her-2 in a mostly human consensus sequence Fab framework. Specifically, the sequence contains a kappa light chain (LC region) upstream of VH and CH1 domains (HC region). The method of making the anti-Her-2 antibody and the identity of the variable domain sequences are provided in U.S. Pat. Nos. 5,821,337 and 6,054,297. The pS0643 plasmid containing humanized 4D5 (version 8) was still further modified. For example, a herpes simplex virus type 1 glycoprotein D epitope tag (gD tag—MADPNRFRGKDLGG (SEQ ID NO: ______)) was added in frame to the c-terminus of the LC using site-directed mutagenesis. Following the stop codon downstream of the LC, a ribosome binding site and nuclec acid molecule encoding a stII signal sequence were ligated to the N-terminus of the HC sequence. Consequently, the HC sequence is in frame with the C-terminal domain of the p3 (cP3), a minor coat protein of M13 phage. Thus, a Fab displayed on phage can be produced from one construct. This Fab phagemid vector is referred to as pV0350-2b and is be schematically illustrated in FIG. 1. The light gene in pV0350-2b was further modified by mutating a few other amino acid residues, e.g., Arg66 to a Gly and S93 to Ala.

[0318] To generate F(ab)′2 displayed on phage, the PV0350-4 vector was further modified by inserting a dimerizable leucine zipper GCN4 sequence (GRMKQLEDKVEELLSKNYHLENEVARLKKLVGERG) (SEQ ID NO: ______) between the HC and cP3 sequences by cassette mutagenesis. The GCN4 leucine zipper brings two sets of LC/HC-cP3 fusion polypeptides together in the E. coli periplasm and presents the dimer on the surface of phage. This F(ab)′2 phagemid vector is referred to as pV0350-4 is also schematically illustrated in FIG. 1.

[0319] For G6-23 heavy chain shotgun-scan library construction, phagemid pW0448-2 was constructed by introducing G6-23 CDRL3 sequence into pV0350-2b phagemid using Kunkel mutagenesis method (Kunkel et al., (1991) Methods Enzymol 204:125-139)). Phagemid pW0448-1 was also generated from pV0350-2b as template for G6 and G6-23 light chain shotgun-scanning library that contains the heavy chain variable domain of G6 and stop codon (TAA) in all three CDRs in light chain.

Construction of Shotgun Scanning Libraries

[0320] Phage-displayed libraries were constructed using Kunkel mutagenesis method as described (Kunkel et al., 1991, supra). In total, eight libraries were generated: hcA-G6, hcA-G6.23, IcA-G6 and IcA-G6.23 were alanine scanning libraries of heavy chain (hc) or light chain (lc) of G6 and G6-23; hcH-G6, hcH-G6.23, lcH-G6, lcH-G6.23 were homolog scanning libraries. The template containing TAA stop codon within all three heavy or light chain CDRs was simultaneously repaired during the mutagenesis reaction by the above mutagenic oligonucleotides with designed degenerate codons. After mutagenesis, 10 ug of DNA were electroporated into E. coli SS320 cells (˜10¹¹ cells) (Sidhu et al., (2000) Methods Enzymol 328:333-363), which were grown overnight at 30° C. in 2YT broth supplemented with M13-KO7 helper phage (New England Biotabs), 50 ug/ml carbenicillin and kanamycin. Library sizes were 2-5×10⁹. Phage were concentrated from the culture media by precipitation with PEG/NaCl and resuspended in phosphate-buffered saline (PBS) as described previously (Sidhu et al., 2000, supra).

Library Sorting and Screening Assays

[0321] Protein target, VEGF or anti-gD tag antibody (provided by Genentech research groups), was immobilized on NUNC (Roskilde, Denmark) 96-well Maxisorp immunoplates overnight at 4° C., and before sorting, the plates were blocked with bovine serum albumin (BSA, Sigma) for 2 hour at room temperature (RT). Phage libraries from the above preparation (˜10¹³ phage/ml) were incubated in the target-coated immunoplates for 1 h at RT to allow for phage binding. Plates were then washed 15 times with PBS and 0.05% Tween 20 (PST) buffer, and bound phage were eluted with 0.1 M HCl for 15 minutes and neutralized with 1.0 M Tris base. Eluted phage were propagated in E. coli XL1-blue (Stratagene) for next round of selection.

[0322] Individual clones selected from the second round of panning were grown in a 96-well plate overnight at 37° C. with 150 ul of 2YT broth supplemented with 50 ug/ml carbenicillin and M13-VCS helper phage (1:2500)(Stratagene). The culture supernatants were directly used in phage competitive enzyme-linked immuno-absorbant assays (phage ELISAs) to screen functional phage-displayed G6 or G6-23 Fab variants binding to target proteins coated on the plate (Sidhu et al., 2000, supra). The clones exhibited both positive phage ELISA signals to VEGF antigen and anti-gD tag antibody were subjected to DNA sequence analysis.

DNA Sequencing and Analysis

[0323] The functional clones from the above screening were grown in 96-well plates with 100 ul of 2YT broth and 50 ug/ml carbenicillin at 37° C. for 2 hour. Little amount of culture supernatants (1˜2 ul) was served as templates for PCRs (GeneAmp® PCR System 9700, Applied Biosystems) to amplify the phagemid DNA fragments containing the light and heavy chain genes with sequencing primers to add M13 (−21) universal sequences at the 5′ end of the amplified fragments, thus facilitating the use of M13 forward primers in sequencing reactions. Amplified DNA fragments in a 96-well format were sequenced using Big-Dye terminator sequencing reactions and analyzed on an ABI Prism 3700 96-capillary DNA analyzer (PE Biosystems, Foster City, Calif.) by Genentech DNA sequencing group. The sequences were analyzed with the program SGCOUNT as described previously (Weiss et al., (2000) PNAS USA 97:8950-8954).

[0324] The following number of functional clones in parenthesis selected from each library against VEGF antigen was subjected to DNA sequence analysis: hcAG6 (107), hcA-G6-23 (124), lcA-G6 (111), lcA-G6-23-(102), hcH-G6 (111), hcH-G6-23 (135), lcH-G6 (106), lcH-66-23 (97). For the clones from anti-gD tag antibody binding selection: hcA-G6 (108), hcA-G6-23 (130), lcA-G6 (116), lcA-G6-23 (98), hcH-G6 (120), hcH-G6-23 (122), lcH-G6 (111), lcH23 (102).

Fab G6 and G6-23 Point Mutants and Affinity Measurements

[0325] To generate G6 and G6-23 Fab mutants for affinity measurements, we used previously modified Fab expression plasmid from phage-displayed vector with an E. coli alkaline phosphatase (phoA) promoter (Presta et al., (1997) Cancer Res 57:4593-4599). Each point mutant was constructed using the Kunkel site-directed mutagenesis method (Kunkel et al., 1991, supra) with oligonucleotides designed to have point mutation within CDRs. For mutant productions, expression plasmids were transformed into 34B8 E. coli cells, and single colony was picked and grown in complete C.R.A.P. medium (Presta et al., 1997, supra) supplemented with 25 ug/ml carbenicillin at 30° C. for 24 h. The expressed recombinant proteins were purified through a Protein G high trap column (Amersham Pharmacia) and quantitated by UV absorption at 280 nm (Presta et al., 1997, supra). The binding affinities of G6 and G6-23 Fab mutants were evaluated using competitive solution binding ELISA with hVEGF displaying phage as described. The fold reduction in wild-type VEGF phage binding activity due to each point mutation was determined by dividing the IC50 for the G6 or G6-23 point mutant by the IC₅₀ for wild-type G6 or G6-23 Fab respectively.

BIACORE™ Binding Analysis for FabG6 and G6-23 Variants

[0326] For binding kinetics, surface plasmon resonance (SRP) measurement with a BIAcore™-3000 (BIAcore, Inc., Piscataway, N.J.) was used as previously described (Karlsson & Fält, (1997) J. Immunol Methods 200:121-133). Carboxymethylated dextran biosensor chips (CM5, BIAcore Inc.) were activated with N-ethyl-N′-(3-dimethylaminopropyl)-carbodiimide hydrochloride (EDC) and N-hydroxysuccinimide (NHS) according to the supplier's instructions. Human VEGF (hVEGF) was diluted with 10 mM sodium acetate, pH 4.8, into 5 ug/ml (˜0.2 uM) before injected at a flow rate of 5 ul/minute to achieve approximately 100 response units (RU) of coupled protein. Following by the injection of 1M ethanolamine to block unreacted groups. For kinetics measurements, two-fold serial dilutions of G6 or G6-23 Fab variants (0.7 nM to 100 nM) were injected in PBS with 0.05% Tween 20 (PBST) at 25° C. at a flow rate of 25 ul/min. Association rates (kₒₙ) and dissociation rates (k_{off}) were calculated using a simple one-to-one Langmuir binding model (BIAcore™ Evaluation Software version 3.2). The equilibrium dissociation constant (Kd) was calculated as the ratio k_{off}/kₒₙ. Based on the selection of the phage library, two resides in heavy chain CDR2 appeared to prefer to be alanine or homologous amino acid. HC-Y58 preferred to be alanine, HC-151 preferred to be valine for binding VEGF. We therefore generated mutant protein Fab with single mutation to confirm the finding from phage libraries. The top graph in FIG. 9 shows that the BIAcore analysis of mutation G6-23-Y58A (G6-23.1) (50 nM) binding to human VEGF coated chip improved the binding on-rate compared to G6-23, which already had a much improved on-rate compared to G6. The lower graph showed the BIAcore analysis of mutant G6-Y58A (G6-1) or G6-151V (G6-2) to VEGF coated chip. Both had improved on-rate compared to G6. In fact, the double mutant (Y58A/I51V) had an additive effect on the on-rate improvement for G6 and G6-23.

Results of Shotgun Scanning of G6 and G6-23

[0327] The results of both shotgun scanning on G6 and G6-23 antibodies indicated that heavy chain CDR side-chains dominated the binding interactions with hVEGF. When mapped onto the X-ray crystal structure of G6 Fab, the functionally important residues in combination represent a portion of the structural epitope, which is defined by the residues in direct contact with hVEGF. The shotgun alanine-scan results revealed the functional epitope comprising the solvent-exposed ridge, which was composed of residues Y32, W33, G54, V96, F97, F98, L99, and Y100a on the heavy chain and Y49 on the light chain. Interestingly, the numbers of functionally important residues revealed by the shotgun homolog-scan were significantly smaller and contained within the group of residues that were important functionally in the shotgun alanine-scan. These hot spots are W33, G54, V96, F97, and L99, which constitute a small patch that overlapped in both scans, suggesting that this surface makes precise contact with the antigen hVEGF that even homologous amino acid substitutions were disruptive. G55 was substituted with alanine only in the homolog scan and it was a highly disruptive, so we believe that G55 is also within this patch.

[0328] Other functional important residues revealed by both scans on the heavy chain, G50 and T52, are not part of the solvent-exposed surface of G6 since they are buried inside according to the structural information, acting as scaffolding side-chains that pack against residues in the functional epitope in order to hold this epitope in a binding-competent conformation (C. Wiesmann, unpublished results). As for F95 in CDR-H3 of G6, definitely, alanine substitution at this position in alanine-scan was disruptive; nonetheless, this residue is capable of tolerating tyrosine substitution in homolog-scan, suggesting that its role is in maintaining the structure integrity of the antigen-binding site, which has also been confirmed with structural information.

[0329] For Y32, F98, and Y100a, the structural information demonstrated that these surface residues were critical and represented 30% of total heavy chain buried surface areas upon binding hVEGF. The alanine substitutions at these residues were definitely disruptive for affinity with significant function ratios (F_{wt/mut} value) greater than 30, yet interestingly, they tolerated homologous amino acid substitutions (Tyr for Phe and vise versa), suggesting that the aromatic rings for these positions were making the important interactions with hVEGF antigen and adding or removing the hydroxyl group was not making much impact, which were distinct from the above scaffolding residues.

[0330] Both shotgun scans identified new mutations in the heavy chain for further affinity improvement, which were I51V and Y58A. This intriguing observations were verified through producing Fab point mutants, and testing binding activity with competitive ELISA and BIAcore™ (FIG. 23 and FIG. 18). Because I51 and Y58 are not the members of structural epitope (C. Wiesmann, unpublished results), it was believed that the affinity improvement, especially in on-rate, with single or double mutation was not from the introduction of new contact with antigen hVEGF, but probably through optimizing the structure integrity of CDR-H2 loop, to make it more competent for antigen binding.

[0331] Based on the structural epitope, G6 light chain CDR residues represented 25% of total structural epitope surface (878 Å²)(C. Wiesmann, unpublished results) Interestingly, the only residue that showed functional importance in both shotgun scanning was Y49 in CDR-L2, which only stood for 2% of the total structural epitope surface, suggesting that most structural epitope residues in the light chain were not involved in the energetic contact with hVEGF antigen. This readout implies that G6 light chain is more important structurally than functionally since it still retained the same sequence as 4D5, the template used for displaying antibody library on the phage where G6 was isolated from in the first place (Carter et al., 1992).

### Example 3

### G6 and G6-23 Derived Antibodies

[0332] (a) Libraries for Selection

[0333] Additional anti-VEGF antibodies were obtained by sorting phage from the shotgun alanine and homolog scanning libraries described in Example 2. Specifically, at particular residues, scanned residues were allowed to vary as either wild type or alanine (alanine scan), or either wild type or a homologue residue (homolog scan). (FIGS. 14A and B). For the G6, shotgun alanine and homolog scanning was performed on the G6 light chain and heavy chain separately, resulting in four libraries. For G623, shotgun alanine and homolog scanning was performed on the G623 light chain, and shotgun homolog scanning was performed on G623 heavy chain, resulting in three libraries. A G623 shotgun alanine scanning library was not prepared because, as discussed above, G623 is a high affinity antibody, with most of its residues critical for binding located in the heavy chain. Mutating heavy chain residues to alanine, which means truncating the heavy chain amino acid side chains, would most likely disrupt binding and result in lower affinity antibody variants.

[0334] (b) Selecting Anti-VEGF Antibodies

[0335] In the first round, a plate sorting strategy was used for selection. Human VEGF (hVEGF, provided by Genentech Research Groups) was immobilized on 96-well Maxisorp immunoplates (NUNC) by incubating wells with 5 ug/ml of protein target over night at 4° C. The plates were blocked with 1% Bovine Serum Albumin (BSA, Sigma) for 30 min in RT, after which 1% Tween20 was added for additional 30 min. The phage libraries described above were incubated on the hVEGF coated immunoplates at a concentration of ˜1E13 phage/ml for 1 h in RT under agitation, to allow binding of the phage displayed Fab to the target. After binding, plates were washed 15 times with PBS supplemented with 0.05% Tween20. Bound phage were eluted by incubating wells with 0.1M HCl for 30 min. Elutions were neutralized with 1.0 M Tris base, pH 11. E. Coli XL1-blue (Stratagene) were infected with the eluted phage and M13-K07 helper phage (New England Biolabs). The phage was propagated over night for the next round of selection.

[0336] The bacterial culture was centrifuged at 8000 rpm for 10 min in a Sorvall GSA rotor at 4° C. and the supernatant collected. The phage was precipitated from the media by addition of ⅕ volume of PEG/NaCl. After 5 min incubation on ice the phage containing culture media was centrifuged at 10 krpm for 15 min in a Sorvall GSA rotor at 4° C. and the supernatant discarded. The remaining phage pellet was resuspended in PBS and centrifuged at 15 krpm for 5 min in a SS-34 rotor at 4° C. to pellet insoluble matter. The supernatant was transferred to a new tube and the phage concentration was estimated by measuring the absorbance at 268 nm.

[0337] The following rounds of sorting were performed by a solution-phase sorting method with increasing stringency. Purified phage was incubated with biotinylated hVEGF for 1 hour at RT in PBS with 0.05% Tween20 and 0.5% Superblock (Pierce). After three to ten-fold dilution with superblock, the mixture was added to neutravidin coated wells blocked with 1% BSA (Sigma) and Tween20. The hVEGF-conjugated biotin was allowed to bind the immobilized neutravidin for 10 min. After capture the plate was washed 10-15 times with 0.05% Tween20 in PBS. To study the background, i.e. nonspecific binding on the phage to neutravidin, a control reaction lacking the biotinylated hVEGF was added to a coated well. The stringency was increased each round by decreasing antigen concentration in solution, as well as phage concentration or increasing temperature. Increasing number of washes is also a way to achieve more stringent conditions. For the third and fourth round of sorting non-biotinylated hVEGF was added to the reaction mix of biotin-hVEGF and library phage to compete off low affinity binders. By adding 1000 fold excess of competitor for 30 min in 37° C. before capturing, stringency could be increased additionally in the last rounds in order to select for high affinity binders. Manipulating binding and capture times could further increase the stringency from round to round.

[0338] For G623 the starting concentration of biotinylated hVEGF was 1 nM for the heavy chain shotgun library and 0.2 nM for the light chain shotgun-scanning library. The concentration was decreased to 0.5 nM and 0.1 nM respectively in the last round. For G6, with lower starting affinity than G623, library sorting was performed with less stringent starting conditions; 5 nM for heavy chain libraries and 2 nM for the light chain libraries, which was decreased to 1.75 and 0.5 nM respectively in the last round of sorting.

[0339] To study the enrichment of hVEGF specific Fabs displayed on the phage, 90 ul E. Coli XL-Blue (Stratagene) was infected with 10 ul phage elution from the captured library binding reactions as well as the background mixtures for 30 min at 37° C. A 5 ul culture was plated out on carbencillin supplemented plates and incubated at 37° C. over night. The number of phage particles in the elution could be calculated from the number of colonies from each elution. After the last two rounds of sorting, 50 ul of the above mentioned culture of phagemid-containing bacteria, was plated out on carbencillin-supplemented plates and grown over night at 37° C. The resulting clones were subject to screening.

[0340] (c) Single Spot Competitive ELISA

[0341] To screen for high affinity clones a high-throughput single point competitive ELISA assay in 96-well format was performed. For both antibodies approximately a hundred clones from the last two rounds of selection were picked randomly and screened in this assay. Phagemid containing E. Coli XL1-blue clones were grown in 400 ul rich 2YT broth, supplemented with carbencillin and M13-KO7 helper phage (New England Biolabs) by shaking over night at 37° C. The culture supernatant of each clone was diluted five times with 0.05% Tween20 and 0.5% BSA in PBS with addition of hVEGF as well as without. After 1 h incubation by shaking in RT, 80 ul of the reactions were transferred to hVEGF-coated immunoplates and incubated for 10 min. The plate was washed 8 times with 0.05% Tween20 in PBS and incubated 30 min with 100 ul anti-M13 antibody horseradish conjugate (New England Biolabs) diluted 5000 times in PBS supplemented with 0.05% Tween20 and 0.5% Bovine Serum Albumin (Sigma). The plates were washed an additional 8 times and developed with TMB substrate for 5 min. The reactions were stopped with 1.0 M H₃PO₄ and read spectrophotometrically at 450 nm. To estimate the relative affinity, the ratio of the optical density in the presence of hVEGF to that of the absence of hVEGF was calculated. A low ratio suggests that most Fab displayed on on the phage bound hVEGF in solution. As a consequence little Fab can bind to the immobilized hVEGF on the immunoplate. Clones showing lower ratio than wild type (WT) G6 or G623 were selected and, their supernatants used to infect XL1-blue. Phagemid containing bacteria were streaked out on carbencillin plates and grown over night at 37° C. for sequencing.

[0342] The selection of the G6 heavy chain libraries resulted in no more than three unique sequences out of the 33 clones analyzed, suggesting that most G6 heavy chain changes result in lost of binding affinity. Furthermore, all unique heavy chain variants derived were from the homolog scan library. It seems that alanine mutation of G6 heavy chain residues can result in a dramatic loss of binding. This intolerance to changes in amino acid sequence selection supports the view that G6 heavy chain harbors many key residues for VEGF binding. The single spot assay result is summarized in Table 2.

TABLE 2

| Single Spot Summary | G623 | | | G6 | |
|---|---|---|---|---|---|
| Library | LC Ala | LC Hom | HC Hom | LC Ala and Hom | HC Ala and Hom |
| Number of clones screened | 84 | 84 | 88 | 88 | 96 |
| Selection Critieria | Clones with significantly lower ratio (Signal +hVEGF/Signal −hVEGF) than WT | | | | |
| Cut Off | Cut off = 2 fold reduction | | | Cut off = 5 fold reduction | Cut Off = WT ratio |
| Number of Clones with ratio < WT | 33 | 17 | 29 | 56 | 33 |
| Number of unique clones | 17 | 12 | 18 | 53 | 3 |
| Results from Single spot assay of G6 and G623 variants. Similar selection crieria was used for both antibody libraries. However, lower cut off was | | | | | |
| used for G6 LC library compared to G6 HC library as HC variants were expected to show less affinity improvment compared to WT than LC variants. | | | | | |
| G6 alanine and homologe libraries were pooled before screening of heavy chain and light chain variants. The number of unique clones from the | | | | | |
| selected pool was determined by DNA sequencing. | | | | | |

LC = Light Chain,
HC = Heavy Chain,
WT = Wild Type,
Hom = Homolog scanning library,
Ala = Alanine scanning library

[0343] (d) DNA Sequencing and Analysis

[0344] Clones selected from the single spot screening were grown in 96-well plates with 100 ul 2YT broth supplemented with carbencillin for 2 hours. 1 ul of the culture was subjected to PCR (GeneAmp® PCR System 9700, Applied Biosystems) in order to amplify the DNA encoding the light chain or heavy chain of the different clones. The primers used in the PCR reaction were designed to add M13 universal sequences at the 5′ end of the amplified fragment. By adding this sequence, M13 forward primers could be used in the following sequencing reactions. After amplification in 96-well format, the DNA fragments were sequenced by Genentech DNA sequencing group using Big-Dye terminator sequencing reactions and analyzed with an ABI Prism 3700 96-capillary DNA analyzer. (PE Biosystems, Fosters City, Calif.). The heavy and light chain sequences were aligned and identical sequences eliminated. Based on their sequence, clones were selected for affinity determination by IC50 measurement

[0345] (e) Affinity Measurement of Phage Clones

[0346] The IC50 values for the phage clones were determined by competitive phage ELISA. A single colony of the selected clones was grown in 5 ml 2YT media supplemented with 50 ug/ml carbencillin for 5 hours. The culture was then infected with M13-K07 helper phage (New England Biolabs) for 1 h and transferred to a 25 ml culture supplemented with 50 ug/ml carbencillin and 50 ug/ml kanamycin. The phage was propagated over night at 37° C. After phage purification as described above, the phage was serially diluted with 0.05% Tween20 and 0.5% BSA in PBS and incubated on a hVEGF coated immunoplate to assess antigen binding at different phage concentrations. The phage dilution that gave ˜70% saturating signal was used in the IC50 determination assay. Phage was incubated with increasing concentration of hVEGF over night at 37° C. The unbound phage was captured on an hVEGF coated immunoplate for 10 min. The plate was washed, and the bound phage was detected with an anti-M13 antibody horseradish conjugate (New England Biolabs) followed by TMB development, as previously described. The hVEGF concentration that inhibited 50% of phage binding to the immobilized antigen represented the IC50. The signals, which indicate bound phage, were plotted against the hVEGF concentration, and the data was fitted to a competitive binding curve by non-linear regression, enabling IC₅₀ determination.

[0347] FIGS. 34 and 35 show the IC₅₀ values of G6 and G6-23 variants, respectively, as well as the alterations in sequences compared to G6 or G6-23. From the G6 pool, many binders with apparent better affinity than wild type G6 were identified. Many more affinity improved G6 variants were derived from the light chain homolog library (FIG. 34A). However, two higher affinity G6 variants were selected from the heavy chain homolog scan library (FIG. 34B).

[0348] Some G6 variants showed up to a hundred-fold affinity improvement, according to the IC₅₀ determinations. Of the few G6 heavy chain variants selected, they differed in only a few residues from wild type G6. These heavy chain mutations were located in CDR-H1 and CDR-H2. The conserved nature of the heavy chain, and CDR-H3 in particular, confirmed that most residues important for G6 binding to hVEGF are present in this region. Mutations were more abundant in the G6 light chain variants. They were mainly located in CDR-L1 and CDR-L3 regions, indicating that changing CDR-L2 residues impairs binding instead of improving affinity. A combination of mutations in CDR-L1 and CDR-L3 seem to be favorable for binding, allowing significant affinity improvement compared to wild type.

[0349] Most G623 variants showed similar or slightly reduced binding affinity compared to wild type according to their 15 values (FIG. 35). The highest affinity variants were derived from both homolog and alanine light chain shotgun library. Only a small number of high affinity binders were identified in the heavy chain shotgun scan pool. As for G6, heavy chain residues were conserved, and only few mutations present among the clones studied. The light chain variants also showed similar mutation-pattern as G6 variants, with most changes located in CDR-L1 and CDR-L3.

### Example 4

### Alanine Scanning of hVEGF to Map Anti-VEGF Antibody Binding Sites

[0350] To understand the molecular basis of the cross reactivity of G6 and G6-23 and to map their functional epitopes, the relative binding affinities of G6 or G6-23 Fab for individual alanine-substituted hVEGF mutants versus wild type hVEGF were measured using hVEGF displaying phage ELISA as previously described (Muller et al., (1997) PNAS USA 94:7192-7197). hVEGF was mutated at sites near the binding epitopes of Flt-1, KDR, the Avastin™ antibody and Y0317 with Kunkel mutagenesis method and phage displaying the individual mutant was generated as described previously (Muller et al., (1997) PNAS USA 94:7192-7197). Solution binding phage ELISAs were used to determine the relative binding affinity of each mutant VEGF mutant versus wild type (wt) VEGF on Fab G6-23, G6-23. Briefly, 96-well Maxisorp immunoplates (NUNC) were coated overnight at 4° C. with G6 or G6-23 Fab at a concentration of 2 ug/ml in PBS, and blocked with PBS, 0.5% BSA, and 0.05% Tween20 (PBT) for 2 h at room temperature. Serial dilutions of phage displaying hVEGF mutants in PBT were first incubated on the G6-Fab-coated plates for 15 min at room temperature, and the plates were washed with PBS, 0.05% Tween20 (PBST). Bound phage were detected with anti-M13 monoclonal antibody horseradish peroxidase (Amersham Pharmacia) conjugate diluted 1:5000 in PBT, developed with 3,3′,5,5′-etramethylbenzidine (TMB, Kirkegaard & Perry Labs, Gaithersburg, Md.) substrate for approximately 5 min, quenched with 1.0 M H₃PO₄, and read spectrophotometrically at 450 nm. The relative IC50 values (IC_{50,Ala}/IC_{50,wt}) to represent the fold of reduction in binding affinity, and evaluate the energetic contribution of individual side-chains of hVEGF for interacting with G6 or G6-23 Fab were calculated.

[0351] The ratios of IC50 represented the energetic contribution of the individual side chain in the interaction with G6 Fab (FIG. 19). The general folding of alanine mutants, especially ones that had significant reduction in binding G6, was verified by its near-wild type binding to other molecules that have distinct epitopes on VEGF, such as the Avastin™ antibody, Y0317 or Flt-1, as mapped previously (FIG. 19). It is evident that G6 had a distinct epitope as compared to hybridoma derived Avastin™ antibody. All functionally important hVEGF residues for binding G6 were conserved between human and murine VEGF, thus explaining in part its cross reactivity. The Fab of the Avastin™ antibody (Fab-12) and Y0317, on the other hand, lost most of their binding to VEGF upon alanine substitution at residue Gly88, which is Ser in mVEGF. To visualize the epitope on a VEGF molecule, functionally important residues for binding G6 were highlighted on the surface of hVEGF crystal structure according to their relative affinities for G6. G6 epitope mapped to a patch that was conserved between human and mouse VEGF and dotted with a few energetically important residues, Phe17, Tyr21,Tyr, Ile83 and Gln89, which clustered in close proximity. This is indicative of a functional epitope with an interaction “hot spot”.

[0352] We next compared the functional epitope of G6 to the structural epitope of Fab-12 (same as Y0317) or Flt-1D2, the VEGF residues that became buried upon forming complex with these molecules based on the crystal structure of the complex. Interestingly, the functional epitope of G6 on VEGF matches the structural epitope for Flt-1D2 more closely than does the structural epitope of Fab-12. Further, G6 shared similar hot spot as Flt-1 for VEGF since residues Phe17, Tyr21 and Tyr25 were highly important energetically for both interactions (FIG. 19). Fab 12 or Y0317, on the other hand, centered on the non-conserved and functionally important residue, Gly88, which is believed to be the reason for its lack of binding to mVEGF. It appeared that phage library derived antibody G6 targeted a conserved epitope on VEGF in a nearly identical fashion as VEGF receptor, while a hybridoma for hVEGF avoided generating a self-reactive anti-mouse antibody. There was, however, sufficient overlap between the two epitopes of G6 and Fab-12 as the binding of G6 and Fab-12 (Y0317) to hVEGF were mutually exclusive (data not shown).

[0353] Comparing the important sites on hVEGF for binding G6 and G6-23 indicated that the residues contributing most energetically, F17, Y21, and Y25 on 20's helix, and Q89A on 80's loop, remained the same, except the impact of residues on binding seemed to change (FIG. 19). For example, residues Y21 and Q89 when changed to alanine became a bigger hit for G6-23 than for G6. There were sites that modestly decreased its relative impact of its side chain in binding to G6-23 as compared to G6, e.g., I83, H86, and I91A.

[0354] There was no new functionally important residues observed for the affinity-improved version, G6-23, yet a shuffling of energetic contributions among these functionally important residues in both antibodies, which was consistent with the finding structurally that identical positions of hVEGF were buried upon complexing with G6 or G6-23 (structural data below). When mapping these functionally important residues along with other moderate contributors on hVEGF structure, they appeared as a contiguous patch within the structural epitope of Flt-1D2, which were highly conserved between human and mouse VEGF, which explains the fact that both antibodies had equal affinity for both VEGF. By comparison of the footprint of both structural and functional epitope for G6 on-hVEGF structure, it clearly showed that heavy chain CDR residues were the ones making contact with the positions on VEGF where alanine mutation were disruptive, such as the 20's helix and 80'loop of hVEGF, whereas light chain CDR residues contact the 60's loop of hVEGF where the side chains were not functionally as important.

[0355] The dilutions of phage that produced the sub-maximal binding signal (50-70%) were used in the solution competition assay where wild type or mutant hVEGF phage in PBT buffer were first incubated with increasing concentration of competing G6 or G6-23 Fab for 1-2 h at room temperature, then the mixtures were transferred to G6-Fab-coated plates to capture the unbound phage for 15 min, and bound phage were detected as described above. Competition curves were fit with a four-parameter non-linear regression curve-fitting program (Kaleidagraph, Synergy Software) to determine the IC₅₀ values which were calculated as the concentration of G6 or G6-23 Fab in solution binding stage that inhibited 50% of the phage from binding to immobilized G6 Fab. The ratio of the IC₅₀ of mutant versus wild type hVEGF is the relative fold difference in binding affinities. For mutants that have severe reduced binding to G6-Fab-coated plate, Fab 12 (Presta, 1997) or Flt-1_{D1-5} were used as coat to capture to mutant phage after incubations with G6 or G6-23 Fab. Binding of hVEGF-phage to G6, G6-23 Fab, Fab 12, Fab and Flt-1_{D1-5} were mutually exclusive as tested with wild type VEGF phage.

### Example 5

### Structural Mapping of VEGF Binding Sites on G6 and G6-23 and of G6 Binding Sites on VEGF by Crystallography

Expression, Purification Crystallization and Structural Analysis

[0356] Residues 8-109 of human VEGF were expressed, refolded, and purified as previously described (Christinger, H. W., et al., (1996). Prot. Struct. Funct. Genet. 26, 353-357).

[0357] G6 Fab was expressed in E. coli and the cell paste was thawed into PBS, 25 mM EDTA, 1 mM PMSF. The mixture was homogenized and then passed twice through a microfluidizer. The suspension was then centrifuged at 12 k rpm for 60 min. The protein was loaded onto a Protein G column previously equilibrated with PBS at 5 ml/min. The column was washed with PBS to base line and then eluted with 0.58% acetic acid. Fractions containing G6 Fab were pooled and loaded directly onto a SP-sepharose column equilibrated with 20 mM MES, pH 5.5. The protein was eluted with a salt gradient of 0 to 0.25 M NaCl.

[0358] G6 eluted from the SP-sepharose column was mixed with hVEGF8-109 and further purified over a Superdex 200 column equilibrated with 30 mM Tris.Cl, pH 7.5 and 0.4 M NaCl. Fractions containing the complex were pooled, concentrated and used in crystallization trials. Crystals were grown at 19° C. using vapor diffusion method in sitting drops. Crystallization buffer containing 2.0 M ammonium sulfate and 5% iso-propanol were mixed in equal volume with protein solution (8 mg/nm protein). Crystals appeared after 3 days and belonged to space group P3121 with cell dimensions of a=117.9 Å and c=212.6 Å. These crystal forms contained 1 complex comprising of a VEGF dimer and 2 Fab molecules in the asymmetric.

[0359] The crystals were soaked in mother liquor, dipped in artificial mother liquor containing 25% glycerol and flash frozen in liquid nitrogen. A 2.8 Å data set was collected on an SSRL Synchrotron Source on beam line 9-1. The data were reduced using programs DENZO and SCALEPACK (Otwinowski, Z. (1993). DENZO. In Data Collection and Processing, L. Sawyer, N. Isaacs, and S. Bailey, eds. (Warrington, UK: 1993).

Structure Determination and Refinement

[0360] The structure was solved by molecular replacement using the coordinates of VEGF (from PDB code 1FLT), constant and variable domains of the antibody in 1BJI (Brookhaven data base) and program AMoRe (CCP4 1994). Model building was done with program O and refinement with Refmac (CCP4 1994). The final Rvalue and Rfree are 19.87% and 23.92%, respectively.

[0361] The following programs were used to calculate the surface areas of interaction RESAREA version 3.2: Aug. 5, 1993 and AREAIMOL version 3-2: Dec. 19, 1995. These programs are part of the CCP4 suite Collaborative Computational Project, Number 4. 1994 (“The CCP4 Suite: Programs for Protein Crystallography” Acta Cryst. D50, 760-763).

[0362] The surface area of each residue of an anti-VEGF antibody that is buried in VEGF (Å²) is reported below together with the percentage of the total surface area of the residue that is buried. Also reported is the surface area of each residue of VEGF antibod that is buried in VEGF (Å²) is reported below together with the percentage of the total surface area of the residue that is buried. See values for G6:VEGF, G6-23:VEGF, Fab-12:VEGF, YADS-1:VEGF and YADS-2:VEGF complex below. In all cases, because VEGF is a dimer, the residue numbers of VEGF referring to monomer 1 (of the VEGF dimer) are 8-109 and residue numbers of VEGF referring to monomer 2 (of the VEGF dimer) are 1008-1109. The first column in each table below recites the residue numbers of the protein being examined (either VEGF or an anti-VEGF antibody) (e.g., for section (a) below, PHE A 17 refers to F17, LYS A1048 refers to K48; MET A1081 refers to MET 81 of VEGF). The second column recites the buried surface of that residue (Å²). The third column recites the buried surface for that residue as a percentage of the surface area of the whole residue.

[0363] (a) VEGF:G6 Complex

TABLE 3
Residues of VEGF in contact with G6

| Residue Nr | buried surface | buried surface in % |
|---|---|---|
| PHE A17 | 17.00 | 54.84% of 31.00 |
| MET A18 | 59.00 | 57.84% of 102.00 |
| TYR A21 | 62.00 | 100.00% of 62.00 |
| GLN A22 | 65.00 | 48.51% of 134.00 |
| TYR A25 | 54.00 | 70.13% of 77.00 |
| ASP A63 | 54.00 | 68.35% of 79.00 |
| GLU A64 | 31.00 | 23.66% of 131.00 |
| LEU A66 | 33.00 | 73.33% of 45.00 |
| CYS A104 | 10.00 | 34.48% of 29.00 |
| PRO A106 | 49.00 | 48.51% of 101.00 |
| LYS A1048 | 40.00 | 86.96% of 46.00 |
| MET A1081 | 17.00 | 94.44% of 18.00 |
| ILE A1083 | 25.00 | 89.29% of 28.00 |
| LYS A1084 | 1.00 | 0.88% of 114.00 |
| PRO A1085 | 2.00 | 3.77% of 53.00 |
| HIS A1086 | 103.00 | 53.65% of 192.00 |
| GLN A1087 | 19.00 | 12.18% of 156.00 |
| GLY A1088 | 13.00 | 38.24% of 34.00 |
| GLN A1089 | 119.00 | 88.15% of 135.00 |
| HIS A1090 | 22.00 | 20.37% of 108.00 |
| ILE A1091 | 30.00 | 47.62% of 63.00 |

CHAIN A DIFF-AREA: 825.0 (7.47% of 11043.0 total AREA for this chain)

[0364] TABLE 4
Residues of G6 in contact with VEGF

| Residue Nr | buried surface | buried surface in % |
|---|---|---|
| ASP B28 | 38.00 | 38.00% of 100.00 |
| SER B30 | 23.00 | 47.92% of 48.00 |
| TYR B49 | 19.00 | 65.52% of 29.00 |
| PHE B53 | 25.00 | 21.55% of 116.00 |
| TYR B92 | 70.00 | 94.59% of 74.00 |
| THR B93 | 19.00 | 38.00% of 50.00 |
| SER B1030 | 17.00 | 21.52% of 79.00 |
| ASP B1031 | 96.00 | 84.21% of 114.00 |
| TYR B1032 | 24.00 | 41.38% of 58.00 |
| TRP B1033 | 52.00 | 77.61% of 67.00 |
| ILE B1051 | 14.00 | 29.79% of 47.00 |
| PRO B1053 | 38.00 | 97.44% of 39.00 |
| ALA B1054 | 26.00 | 42.62% of 61.00 |
| GLY B1055 | 49.00 | 96.08% of 51.00 |
| GLY B1056 | 39.00 | 97.50% of 40.00 |
| TYR B1057 | 38.00 | 22.35% of 170.00 |
| PHE B1099 | 2.00 | 100.00% of 2.00 |
| PHE B1101 | 101.00 | 90.99% of 111.00 |
| PHE B1102 | 109.00 | 84.50% of 129.00 |
| LEU B1103 | 10.00 | 62.50% of 16.00 |
| PRO B1104 | 5.00 | 13.16% of 38.00 |
| TYR B1105 | 42.00 | 66.67% of 63.00 |

CHAIN B DIFF-AREA: 856.0 (4.44% of 19280.0 total AREA for this chain)
TOTAL DIFF-AREA: 1681.0 (5.54% of 30323.0 total AREA over all chains)

[0365] (b) VEGF:G6-23 Complex

TABLE 5
Residues of VEGF in contact with G6-23
Residues 8:109 relate to monomer 1 (of the VEGF dimer). Residues
1008:1109 to monomer 2 (of the VEGF dimer)

| Residue Nr | buried surface | buried surface in % |
|---|---|---|
| LYS A48 | 35.00 | 64.81% of 54.00 |
| MET A81 | 23.00 | 95.83% of 24.00 |
| ILE A83 | 18.00 | 90.00% of 20.00 |
| LYS A84 | 1.00 | 1.04% of 96.00 |
| PRO A85 | 2.00 | 4.76% of 42.00 |
| HIS A86 | 114.00 | 55.34% of 206.00 |
| GLN A87 | 18.00 | 11.18% of 161.00 |
| GLY A88 | 14.00 | 42.42% of 33.00 |
| GLN A89 | 116.00 | 87.88% of 132.00 |
| HIS A90 | 22.00 | 16.30% of 135.00 |
| ILE A91 | 33.00 | 49.25% of 67.00 |
| PHE A1017 | 24.00 | 68.57% of 35.00 |
| MET A1018 | 56.00 | 46.67% of 120.00 |
| TYR A1021 | 72.00 | 100.00% of 72.00 |
| GLN A1022 | 68.00 | 56.20% of 121.00 |
| TYR A1025 | 58.00 | 67.44% of 86.00 |
| CYS A1061 | 3.00 | 16.67% of 18.00 |
| ASP A1063 | 46.00 | 58.97% of 78.00 |
| GLY A1065 | 7.00 | 18.92% of 37.00 |
| LEU A1066 | 38.00 | 70.37% of 54.00 |
| GLU A1103 | 5.00 | 6.17% of 81.00 |
| CYS A1104 | 16.00 | 72.73% of 22.00 |
| ARG A1105 | 2.00 | 1.80% of 111.00 |
| PRO A1106 | 67.00 | 68.37% of 98.00 |

CHAIN A DIFF-AREA: 858.0 (7.65% of 11223.0 total AREA for this chain)

[0366] TABLE 6
Residues of G6-23 in contact with VEGF
Residues 1:211 refer to the light chain. Residues 1001:1223
refer to the heavy chain.

| Residue Nr | buried surface | buried surface in % |
|---|---|---|
| ASP B28 | 25.00 | 27.17% of 92.00 |
| SER B30 | 44.00 | 75.86% of 58.00 |
| THR B31 | 6.00 | 10.91% of 55.00 |
| ALA B32 | 1.00 | 33.33% of 3.00 |
| TYR B49 | 21.00 | 58.33% of 36.00 |
| PHE B53 | 21.00 | 19.27% of 109.00 |
| TYR B92 | 72.00 | 71.29% of 101.00 |
| SER B1030 | 18.00 | 24.00% of 75.00 |
| ASP B1031 | 96.00 | 84.21% of 114.00 |
| TYR B1032 | 28.00 | 48.28% of 58.00 |
| TRP B1033 | 47.00 | 73.44% of 64.00 |
| ILE B1051 | 14.00 | 32.56% of 43.00 |
| PRO B1053 | 29.00 | 65.91% of 44.00 |
| ALA B1054 | 28.00 | 57.14% of 49.00 |
| GLY B1055 | 51.00 | 89.47% of 57.00 |
| GLY B1056 | 34.00 | 97.14% of 35.00 |
| TYR B1057 | 37.00 | 21.76% of 170.00 |
| PHE B1099 | 1.00 | 33.33% of 3.00 |
| PHE B1101 | 113.00 | 86.92% of 130.00 |
| PHE B1102 | 101.00 | 84.17% of 120.00 |
| LEU B1103 | 12.00 | 80.00% of 15.00 |
| PRO B1104 | 4.00 | 8.00% of 50.00 |
| TYR B1105 | 54.00 | 68.35% of 79.00 |

CHAIN B DIFF-AREA: 857.0 (4.38% of 19547.0 total AREA for this chain)
TOTAL DIFF-AREA: 1715.0 (5.57% of 30770.0 total AREA over all chains)

[0367] (c) VEGF: Fab-12

TABLE 7
Residues of VEGF in contact with Fab-12 (PDB code 1bj1)
Residues 8:109 relate to monomer 1 (of the VEGF dimer). Residues
1008:1109 to monomer 2 (of the VEGF dimer)

| Residue Nr | buried surface | buried surface in % |
|---|---|---|
| TYR A45 | 30.00 | 48.39% of 62.00 |
| LYS A48 | 23.00 | 41.82% of 55.00 |
| GLN A79 | 13.00 | 38.24% of 34.00 |
| TYR A45 | 30.00 | 48.39% of 62.00 |
| LYS A48 | 23.00 | 41.82% of 55.00 |
| GLN A79 | 13.00 | 38.24% of 34.00 |
| ILE A80 | 1.00 | 100.00% of 1.00 |
| MET A81 | 37.00 | 100.00% of 37.00 |
| ARG A82 | 53.00 | 85.48% of 62.00 |
| ILE A83 | 30.00 | 71.43% of 42.00 |
| LYS A84 | 11.00 | 20.00% of 55.00 |
| HIS A86 | 77.00 | 37.93% of 203.00 |
| GLN A87 | 119.00 | 80.95% of 147.00 |
| GLY A88 | 38.00 | 100.00% of 38.00 |
| GLN A89 | 134.00 | 100.00% of 134.00 |
| HIS A90 | 114.00 | 100.00% of 114.00 |
| ILE A91 | 75.00 | 93.75% of 80.00 |
| GLY A92 | 33.00 | 100.00% of 33.00 |
| GLU A93 | 83.00 | 62.41% of 133.00 |
| MET A94 | 5.00 | 50.00% of 10.00 |
| PHE A1017 | 25.00 | 55.56% of 45.00 |
| TYR A1021 | 16.00 | 21.92% of 73.00 |

CHAIN A DIFF-AREA: 917.0 (8.42% of 10895.0 total AREA for this chain)

[0368] TABLE 8
Residues of Fab-12 in contact with VEGF
Residues 1:211 refer to the light chain. Residues
1001:1223 refer to the heavy chain.

| Residue Nr | buried surface | buried surface in % |
|---|---|---|
| TYR B91 | 4.00 | 40.00% of 10.00 |
| SER B92 | 12.00 | 25.00% of 48.00 |
| THR B93 | 2.00 | 4.44% of 45.00 |
| VAL B94 | 34.00 | 37.36% of 91.00 |
| TRP B96 | 19.00 | 86.36% of 22.00 |
| THR B1030 | 5.00 | 11.36% of 44.00 |
| ASN B1031 | 85.00 | 80.19% of 106.00 |
| TYR B1032 | 22.00 | 52.38% of 42.00 |
| GLY B1033 | 9.00 | 100.00% of 9.00 |
| TRP B1050 | 53.00 | 91.38% of 58.00 |
| ASN B1052 | 31.00 | 86.11% of 36.00 |
| THR B1053 | 3.00 | 75.00% of 4.00 |
| TYR B1054 | 93.00 | 51.96% of 179.00 |
| THR B1055 | 6.00 | 7.41% of 81.00 |
| THR B1059 | 29.00 | 53.70% of 54.00 |
| TYR B1099 | 12.00 | 100.00% of 12.00 |
| PRO B1100 | 13.00 | 81.25% of 16.00 |
| HIS B1101 | 58.00 | 56.31% of 103.00 |
| TYR B1102 | 122.00 | 95.31% of 128.00 |
| TYR B1103 | 34.00 | 18.68% of 182.00 |
| GLY B1104 | 41.00 | 50.62% of 81.00 |
| SER B1105 | 4.00 | 6.67% of 60.00 |
| SER B1106 | 41.00 | 77.36% of 53.00 |
| HIS B1107 | 4.00 | 23.53% of 17.00 |
| TRP B1108 | 96.00 | 97.96% of 98.00 |

CHAIN B DIFF-AREA: 832.0 (4.29% of 19409.0 total AREA for this chain)
TOTAL DIFF-AREA: 1749.0 (5.77% of 30304.0 total AREA over all chains)

[0369] The residues having greater than 5 Å² buried surface area and/or greater than 5% buried were considered significantly contacted. These results help describe the regions in VEGF and the regions in the antibodies that contact one another. Together with functional data relating to the binding VEGF presented earlier, common features of the G6 series of antibodies and the B20 series of antibodies (structural data not shown) can be observed. G6, G6-23 and B20 antibodies, as well as others bound to both mouse and human VEGF with relatively high affinities, unlike Fab-12 or YO317 (data not shown). Mutations of human VEGF G88A or G88S severely effected binding of Fab-12 or YO317 to VEGF, whereas the G6 series of antibodies and the B20 series of antibodies (structural data not shown) were relatively unaffected. Further, the binding of antibodies such as Fab-12 to VEGF resulted in the surface area of G88 being 100% buried whereas the binding of G6 and G6-23 resulted in G88 being less than 66% buried. Thus, it is believed that although partial contact with G88 is allowable for antibodies having the property of recognizing both mouse and human VEGF with good affinity, it is not likely that antibodies that contact human VEGF such that the surface area of Gly88 of human VEGF is 80% or more buried will bind to both mouse and human VEGF with good affinity. The functional epitope mapping results also show that the footprint of the G series of antibodies on VEGF is different from Fab-12 in that it has a greater contact extending into the 20's helix of VEGF (approximately residues numbered 10-30 of human VEGF) as well as contacting residues in the 80s loop (approximately residues 80-94 of human VEGF). The structural studies correlate well with the functional studies (see FIG. 19) in that mutations to several residues in the 20s helix decrease binding of the G6 and B20 series antibodies. The functional studies described in FIG. 19 indicate that the G6 and the B20 series antibodies interact well with residues that are important for both Flt-1 and KDR binding as compared to A4.6.1

### Example 6

### Tetrinomial Diversity Libraries

[0370] To investigate whether a small subsets of the natural amino acids could be used to generate antigen-binding surfaces, we constructed naïve heavy chain phage-displayed libraries of antigen-binding fragments (Fabs) based on the humanized Fab4D5 (30), which recognizes the extracellular domain of the human receptor tyrosine kinase ErbB2 (Fendly, B. M., et al., (1996), Cancer Res. 50:1550-8. First, a previously described phagemid was modified to display bivalent Fab4D5 (Fab′-zip) on the surface of M13 bacteriophage. The gene coding for the Fab′-zip was fused to the C-terminal domain of the M13 gene-3 minor coat protein and expressed under the control of the phoA promoter (Lee, V., et al., (2004) J. Immunol. Methods 284:119-132). The phagemid was modified by a single mutation in the light chain (R66G) and by the introduction of TAA stop codons into all three heavy chain CDRs. For each library construction, the resulting phagemid (pV-0116c) was used as the “stop template” in a mutagenesis reaction with oligonucleotides designed to repair simultaneously the stop codons and introduce designed mutations at the desired sites, as described previously (Sidhu, S. S. et al., (2004) J. Mol. Biol. 338(2):299-310; Sidhu, S S et al., (2000) Methods in Enzymology 328:333-363).

[0371] a. Construction of KMT Library

[0372] Solvent-accessible positions within the heavy chain CDRs encoded by the phagemid were replaced by a single type of degenerate codon, KMT, that produced equal proportions of four amino acids (Y, A, D, S). The number of possible tetranomial combinations of the 20 natural amino acids is too great to be investigated exhaustively, and thus, we chose combinations that fulfilled two criteria. Firstly, we were restricted to combinations that could be accessed with standard DNA synthesis methods. Secondly, we ensured that each tetranomial set contained at least one small amino acid (glycine, serine or alanine), as we reasoned that small residues would provide conformational flexibility and prevent steric crowding. A total of 18 positions were chosen, for randomization: positions 28 and 30-33 in CDR-H1; positions 50, 52, 53, 54, 56 and 58 in CDR-H2; and positions 95-100a in CDR-H3. Each constructed library contained ˜10¹⁰ unique members, and thus, the library diversities were only about one order of magnitude less than the maximum theoretical diversity (4¹⁸=7×10¹⁰). The KMT library name corresponds to the degenerate codon used; equimolar DNA degeneracies are represented by RUB code (K=G/T, M=A/C, R=A/G, S=G/C, W=A/T, Y=C/T).

[0373] b. Sorting and Binding Assays for the KMT Library

[0374] Phage from the naïve heavy chain library was cycled through rounds of binding selection with either human vascular endothelial growth factor (hVEGF) or other antigens on 96-well Maxisorp immunoplates (NUNC) as the capture target, as described previously (Sidhu, S. S. et al., (2004) supra; Sidhu, S S et al., (2000) Methods in Enzymology 328:333-363). Bound phage were eluted with 0.1 M HCl for 10 min and the eluant was neutralized with 1.0 M Tris base. Phage were propogated in E. coli XL1-blue (Stratagene) with the addition of M13-KO7 helper phage (New England Biolabs).

[0375] After three rounds of selection, individual clones were grown in a 96-well format in 500 ul of 2YT broth supplemented with carbenicillin and M13-KO7. The culture supernatants were used in phage ELISAs to detect positive clones that bound to antigen-coated plates but not to BSA-coated plates (Sidhu, S. S. et al., (2004) supra). Positive clones were subjected to DNA sequence analysis assessed for antigen-specific binding with phage enzyme-linked immunosorbant assays (ELISAs) (Sidhu, S. S. et al., (2004) supra). Approximately 100 clones were screened against each antigen and specific binding clones were identified in each case. DNA sequencing revealed the number of unique clones isolated against each antigen. At least one tyrosine-containing library was successful against each antigen. In particular, Library-KMT was successful against 3 of the 4 antigens and generated 11 unique clones against human vascular endothelial growth factor (hVEGF).

[0376] c. Second KMT Library—Light Chain Diversity

[0377] We constructed new versions of the KMT library in which the CDR-H1 and CDR-H2 diversities were the same as described above, but the diversity of CDR-H3 was increased by allowing for all possible length variations ranging from 3-15 residues inserted between residues 94 and 100b. All together, the pooled libraries contained a diversity of ˜10¹⁰ unique members that were cycled through selections for binding to hVEGF. Phage ELISA screens identified 93 hVEGF binders and DNA sequencing revealed 15 unique sequences (FIG. 36). Most of the clones contained CDR-H3 sequences with seven inserted residues, but we also identified two clones that contained longer insertions. The unique clones were subjected to competitive phage ELISAs (Sidhu, S. S. et al., (2004) supra) and exhibited estimated affinities in the 10 micromolar range (data not shown).

[0378] c. Affinity Maturation of Unique Clones from Second KMT Library

[0379] We next investigated whether the low affinity anti-VEGF clones could be affinity matured to obtain Fabs with affinities comparable to those of natural antibodies. To this end, we recombined the 15 heavy chains (FIG. 36) with a light chain library in which 12 solvent-accessible positions were replaced with the same tetranomial KMT codon. Specifically, the following light chain positions were randomized: positions 28-32 in CDR-L1, positions 50 and 53 in CDR-L2, and positions 91-94 and 96 in CDR-L3. The libraries contained ˜10¹⁰ unique members which greatly exceeded the theoretical diversity of possible light chains (4¹²=2×10⁷). The phagemid selected for the display of a heavy chain sequence and above light chain sequence had been modified by the introduction of TAA stop codons into all three light chain CDRs. The resulting phagemid was used as the “stop template” in a mutagenesis reaction that repaired the stop codons and introduced desired mutations, as described above.

[0380] Phage from the light chain libraries were incubated for 2 h at room temperature in PBS, 0.05% Tween 20 (Sigma), 0.5% Superblock (Pierce) with 100 nM hVEGF biotinylated with Sulfo-NHS-LC-Biotin reagent (Pierce). Biotinylated hVEGF and bound phage were captured for 5 min with neutravidin (Pierce) immobilized on Maxisorp immunoplates. The plates were washed with PBS, 0.05% Tween 20 and the bound phage were eluted and propagated for additional rounds of selection, as described above.

[0381] After selection, individual clones were grown in a 96-well format in 500 ul of 2YT broth supplemented with carbenicillin and M13-KO7. The culture supernatants were used in phage ELISAs to detect positive clones that, bound to antigen-coated plates but not to BSA-coated plates (Sidhu, S. S. et al., (2004) supra). Positive clones were subjected to DNA sequence analysis.

[0382] hVEGF in solution was used for a high stringency selection. We sequenced 256 clones and identified 64 unique light chains combined with 9 of the 15 heavy chains (top 9 sequences in FIG. 36). Competitive phage ELISAs were used to estimate affinities of clones (Sidhu, S. S. et al., (2004) supra). Such ELISAs were carried out generally as follows. Phage clones were propagated from a single colony by growing in 40 ml of 2YT culture supplemented with carbenicillin and KO7 helper phage overnight at 30° C. Phage purified by PEG/NaCl precipitation were first serially diluted in PBST and tested for binding to an antigen-coated plate (hVEGF or mVEGF). The dilution that gave 50-70% saturating signal was used in the solution binding assay in which phage were first incubated with increasing concentration of antigen for 1-2 h and then transferred to antigen coated plate to capture the unbound phage for 10-15 min. An IC₅₀ was calculated as the concentration of antigen in solution binding stage that inhibited 50% of the phage from binding to immobilized antigen. The three highest affinity phage clones were YADS1, YADS2 and YADS3, which clones were converted into Fabs.

[0383] d. YADS1, 2 and 3 Fab Binding Affinities

[0384] YADS1, 2 and 3 were purified as free Fab proteins for detailed analysis. The sequence of these Fabs are provided below. See also FIG. 39.

YADS1 Light Chain
DIQMTQSPSSLSASVGDRVTITCRASQASYSSVAWYQQKPGKAPKLLIYA
ASYLYSGVPSRFSGSGSGTDFTLTISSLQPEDFATYYCQSSASPATFGQG
TKVEIKRTVAAPSVFIFPPSDEQLKSGTASVVCLLNNFYPREAKVQWKVD
NALQSGNSQESVTEQDSKDSTYSLSSTLTLSKADYEKHKVYACEVTHQGL
SSPVTKSFNRGEC
YADS1 Heavy Chain
MKKNIAFLLASMFVFSIATNAYAEVQLVESGGGLVQPGGSLRLSCAASGF
DIYDDDIHWVRQAPGKGLEWVAYIAPSYGYTDYADSVKGRFTISADTSKN
TAYLQMNSLRAEDTAVYYCSRSSDASYSYSAMDYWGQGTLVTVSSASTKG
PSVFPLAPSSKSTSGGTAALGCLVKDYFPEPVTVSWNSGALTSGVHTFPA
VLQSSGLYSLSSVVTVPSSSLGTQTYICNVNHKPSNTKVDKKVEPKSCDK
TH
YADS2 Light Chain
DIQMTQSPSSLSASVGDRVTITCRASQSYAYAVAWYQQKPGKAPKLLIYD
ASYLYSGVPSRFSGSGSGTDFTLTISSLQPEDFATYYCQQAYSSPDTFGQ
GTKVEIKRTVAAPSVFIFPPSDEQLKSGTASVVCLLNNFYPREAKVQWKV
DNALQSGNSQESVTEQDSKDSTYSLSSTLTLSKADYEKHKVYACEVTHQG
LSSPVTKSFNRGEC
YADS2 Heavy Chain
MKKNIAFLLASMFVFSIATNAYAEVQLVESGGLVQPGGSLRLSCAASGFA
ISDYDIHWVRQAPGKGLEWVADIAPYAGATAYADSVKGRFTISADTSKNT
AYLQMNSLRAEDTAVYYCSRSSYAYYAAMDYWGQGTLVTVSSASTKGPSV
FPLAPSSKSTSGGTAALGCLVKDYFPEPVTVSWNSGALTSGVHTFPAVLQ
SSGLYSLSSVVTVPSSSLGTQTYICNVNHKPSNTKVDKKVEPKSCDKTH
YADS3 light Chain
DIQMTQSPSSLSASVGDRVTITCRASQASYYDVAWYQQKPGKAPKLLIYA
ASYLYSGVPSRFSGSGSGTDFTLTISSLQPEDFATYYCQQYYYAPATFGQ
GTKVEIKRTVAAPSVFIFPPSDEQLKSGTASVVCLLNNFYPREAKVQWKV
DNALQSGNSQESVTEQDSKDSTYSLSSTLTLSKADYEKHKVYACEVTHQG
LSSPVTKSFNRGEC
YADS3 Heavy Chain
MKKNIAFLLASMFVFSIATNAYAEVQLVESGGGLVQPGGSLRLSCAASGF
SISDYDIHWVRQAPGKGLEWVAAIAPYSGSTYYADSVKGRFTISADTSKN
TAYLQMNSLRAEDTAVYYCSRSSYAYYSAMDYWGQGTLVTVSSASTKGPS
VFPLAPSSKSTSGGTAALGCLVKDYFPEPVTVSWNSGALTSGVHTFPAVL
QSSGLYSLSSVVTVPSSSLGTQTYICNVNHKPSNTKVDKKVEPKSCDKTH

[0385] Fab proteins were purified from E. coli shake-flask cultures, as described previously (Muller, Y A et al., (1998) Structure 6:1153-1167). Generally, the variable domains were cloned into vectors designed for Fab expression in E. coli or transient IgG expression in mammalian cells. The Fab expression vector was derived from the phage display phagemid by deleting the sequence encoding for cP3 and adding an □ terminator sequence (GCTCGGTTGCCGCCGGGCGTTTTTTAT) about 20 nucleotides downstream from the stop codon at the end of C_{H}1. Fab protein was generated by growing the transformed 34B8 E. coli cells in AP5 media at 30□C for 24 h as described (Presta, L. G., et al., (1997) Cancer Res. 57, 4593-4599). Fab was purified with Protein G affinity chromatography. The production yield for Fab was typically 5-10 mg/L in small scale shake flask growth and 0.5-3 g/L in fermenter growth.

[0386] Binding kinetic values for the purified Fabs based on surface plasmon resonance are shown below. hVEGF₈₋₁₀₉ or mVEGF were immobilized on CM5 chips at ˜100 response units in a BIAcore™-3000, as described previously (Chen, Y., et al., (1999) J. Mol. Biol. 293:865-881)._Serial dilutions of Fab proteins (3-500 nM) were injected, and binding responses on the hVEGF or mVEGF flow cell were corrected by subtraction of responses on a blank flow cell. For kinetic analysis, a 1:1 Languir model with separate fittings of kₒₙ and k_{off} was used. The K_{d} values were estimated from the ratios of kₒₙ and k_{off}. All three Fabs bound with high affinity to hVEGF, but only two exhibited appreciable affinity for the highly homologous murine VEGF (mVEGF, 90% amino acid identity). We reasoned that YADS2 and YADS3 recognized VEGF through a very similar mechanism, as they exhibited high sequence homology in their CDRs and bound to both human and murine VEGF. In contrast, YADS1 likely represented a unique mode of antigen recognition as it contained very different CDR sequences and did not recognize mVEGF.

[0387] Kinetic analysis of Fabs binding to immobilized VEGF

| | kₒₙ (s⁻¹ M⁻¹) | | k_{off} (s⁻¹) | | k_{d} (nM) | |
|---|---|---|---|---|---|---|
| Fab | hVEGF | mVEGF | hVEGF | mVEGF | hVEGF | mVEGF |
| YADS | 3 × 10⁵ | ND¹ | 5 × 10⁻⁴ | ND¹ | 1.8 ± 0.3 | >1000 |
| 1 | | | | | | |
| YADS | 1 × 10⁶ | 8 × 10⁵ | 1 × 10⁻² | 4 × 10⁻³ | 10 ± 2 | 5.0 ± |
| 2 | | | | | | 0.8 |
| YADS | 1 × 10⁶ | 2 × 10⁶ | 3 × 10⁻³ | 5 × 10⁻³ | 2.0 ± 0.4 | 3.7 ± |
| 3 | | | | | | 0.6 |

¹Values could not be determined due to the low affinity of the interaction.

### Example 7

### Crystallization, Structure Determination and Refinement of YADS1 and YADS2

[0388] We wanted to study the structural basis for antigen recognition, and so, the crystal structures of YADS1 and YADS2 in complex with hVEGF.

[0389] a. Fab Protein Preparation for Crystal Structure Analysis

[0390] Whole cell broth was obtained from a 10 liter E. coli fermentation. The cells were lysed with a Manton-Gaulin homogenizer. The suspension was centrifuged, the supernatant was loaded on a protein A-Sepharose column (Genentech, Inc.), and the column was eluted with 0.1 M acetic acid. The pH was adjusted to 4.0 with 1.0 M Tris, pH 8.0 and the eluant was loaded on a SP-Sepharose column (Pharmacia). The column was washed with equilibration buffer (20 mM MES, pH 5.5) and Fab protein was eluted with a NaCl gradient in equilibration buffer. Residues 8-109 of human VEGF were expressed, refolded, and purified as previously described (Christinger, H. W., et al., (1996). Prot. Struct. Funct. Genet. 26, 353-357).

[0391] The complex between each Fab and the receptor-binding fragment of hVEGF was formed and purified, as described previously (Muller, Y. A., (1998), supra). The complex Cm PBS, 25 mM EDTA) was concentrated to an optical density of A₂₈₀=10. Hanging-drop experiments were performed using the vapor-diffusion method with 10 ul drops consisting of a 1:1 ratio of protein solution and reservoir solution. The reservoir solution for the YADS1 complex was 0.2 M ammonium sulfate, 25% PEG 3350 (w/v), 0.1 M HEPES, pH 7.5. The reservoir solution for the YADS2 complex was 1.0 M lithium chloride, 10% PEG 6000 (w/v), 0.1 M MES, pH 6.0. After 1-2 weeks at 19° C., plate or spindle shaped crystals grew for the YADS1 or YADS2 complex, respectively.

[0392] Crystals were incubated in reservoir solution supplemented with 25% glycerol prior to flash freezing. A data set was collected from a single frozen crystal at the beam line 5.0.2 of the Advanced Light Source (Berkeley) for YADS1 and at the beam line 9.2 of the Stanford Synchrotron Radiation Laboratory (Stanford University) for YADS2. The data was processed using the programs DENZO and SCALEPACK (Otwinowski, Z. M., (1997) Methods Enzymol. 276:307-326). The structures were solved by molecular replacement using the program AMoRe (CCP4 (1994) Acta Cryst. D50:760-763) and the coordinates of a previously solved Fab-hVEGF complex (PDB entry 1BJI). The structure was refined using the programs REFMAC (CCP4 (1994), supra). The models were manually adjusted using program O (Jomes, T. A., et al., (1991) Acta Crystallogra A 47 (Pt2):969-995). The following programs were used to calculate the surface areas of interaction RESAREA version 3.2: Aug. 5, 1993 and AREAIMOL version 3.2: Dec. 19, 1995. These programs are part of the CCP4 suite Collaborative Computational Project, Number 4. 1994 (“The CCP4 Suite: Programs for Protein Crystallography” Acid Cryst. D50, 760-763). The crystal structures of YADS1 and YADS2 in complex with hVEGF were solved and refined at 2.65 and 2.8 Å resolution, respectively (Table 9).

TABLE 9
Data collection and refinement statistics for YADS1 and YADS2 hVEGF complexes.

| | | YADS 1 | YADS 2 |
|---|---|---|---|
| A. Unit cell | Space group | P2₁ | C222₁ |
| | a (Å) | 83.3 | 96.5 |
| | b (Å) | 112.5 | 149.6 |
| | c (Å) | 105.8 | 117.4 |
| | Beta (deg.) | 105.8 | |
| B. Diffraction Data | Resolution (Å) | 50 − 2.6 (2.7 − 2.6)^{a} | 50 − 2.8 (2.9 − 2.8)^{a} |
| | No. of reflections | 156868 | 111731 |
| | No. of unique reflections | 41828 | 20861 |
| | R_{merge}^{b} | 0.066 (0.356)^{a} | 0.076 (0.399)^{a} |
| | Completeness (%) | 99.9 (99.1)^{a} | 97.3 (83.2)^{a} |
| C. Refinement | R_{work}^{c,} R_{free}^{c} | 0.212, 0.271 | 0.218, 0.254 |
| | No. of non-H atoms | 8104 | 4077 |
| | No. of waters | 110 | 0 |
| | rmsd bond length (Å) | 0.011 | 0.011 |
| | rmsd angles (deg.) | 1.2 | 1.3 |

^{a}Values for the outer resolution shell are given in parantheses.
^{b}R_{merge} = Σₕₖₗ|Iₕₖₗ − <Iₕₖₗ>|)/Σₕₖₗ <Iₕₖₗ>, where I_{hld} is the intensity of reflection hkl, and <Iₕₖₗ> is the average intensity of multiple observations.
^{c}R_{work} = Σ|Fₒ − F_{c}|/ΣFₒ, where Fₒ and F_{c} are the observed and calculated structure factor amplitudes, respectively. R_{free} is the R factor for a randomly selected 5% of reflections which were nor used in the refinement

[0393] The surface area of each residue of an anti-VEGF antibody that is buried in VEGF (Å²) is reported below together with the percentage of the total surface area of the residue that is buried. Also reported is the surface area of each residue of VEGF antibody that is buried in VEGF (Å²) is reported below together with the percentage of the total surface area of the residue that is buried. See values for YADS-1:VEGF and YADS-2:VEGF complexes below. In all cases, because VEGF is a dimer, the residue numbers of VEGF referring to monomer 1 (of the VEGF dimer) are 8-109 and residue numbers of VEGF referring to monomer 2 (of the VEGF dimer) are 1008-1109. The first column in each table below recites the residue numbers of the protein being examined (either VEGF or an anti-VEGF antibody) (e.g., for section (a) below, TYR A 45 refers to Y45, LYS A1016 refers to K16 of VEGF). The second column recites the buried surface of that residue (Å²). The third column recites the buried surface for that residue as a percentage of the surface area of the whole residue

[0394] (a) VEGF:YADS-1

TABLE 10
Residues of VEGF in contact with YADS-1

| Residue Nr | buried surface | buried surface in % |
|---|---|---|
| TYR A45 | 8.00 | 20.51% of 39.00 |
| ILE A46 | 36.00 | 37.89% of 95.00 |
| LYS A48 | 14.00 | 20.90% of 67.00 |
| GLN A79 | 31.00 | 81.58% of 38.00 |
| MET A81 | 24.00 | 75.00% of 32.00 |
| ARG A82 | 7.00 | 14.58% of 48.00 |
| ILE A83 | 33.00 | 76.74% of 43.00 |
| LYS A84 | 25.00 | 40.98% of 61.00 |
| PRO A85 | 8.00 | 14.55% of 55.00 |
| HIS A86 | 107.00 | 54.04% of 198.00 |
| GLN A87 | 110.00 | 71.43% of 154.00 |
| GLY A88 | 38.00 | 95.00% of 40.00 |
| GLN A89 | 103.00 | 88.79% of 116.00 |
| HIS A90 | 93.00 | 75.61% of 123.00 |
| ILE A91 | 71.00 | 89.87% of 79.00 |
| GLY A92 | 12.00 | 60.00% of 20.00 |
| GLU A93 | 21.00 | 17.50% of 120.00 |
| LYS A1016 | 31.00 | 25.20% of 123.00 |
| PHE A1017 | 21.00 | 46.67% of 45.00 |
| MET A1018 | 14.00 | 10.14% of 138.00 |
| ASN A1062 | 10.00 | 28.57% of 35.00 |
| ASP A1063 | 6.00 | 6.38% of 94.00 |
| GLU A1064 | 89.00 | 49.17% of 181.00 |
| LYS A1107 | 0.00 | 0.00% of 165.00 |

CHAIN A DIFF-AREA: 912.0 (8.16% of 11170.0 total AREA for this chain)
TOTAL DIFF-AREA: 912.0 (8.16% of 11170.0 total AREA over all chains

[0395] (b) VEGF: YADS-2

TABLE 11
Residues of VEGF in contact with YADS-2

| Residue Nr | buried surface | buried surface in % |
|---|---|---|
| ILE A 46 | 6.00 | 8.82% of 68.00 |
| LYS A 48 | 39.00 | 60.94% of 64.00 |
| GLN A 79 | 17.00 | 45.95% of 37.00 |
| MET A 81 | 29.00 | 96.67% of 30.00 |
| ILE A 83 | 32.00 | 86.49% of 37.00 |
| PRO A 85 | 22.00 | 38.60% of 57.00 |
| HIS A 86 | 128.00 | 64.00% of 200.00 |
| GLN A 87 | 32.00 | 23.88% of 134.00 |
| GLY A 88 | 22.00 | 64.71% of 34.00 |
| GLN A 89 | 119.00 | 88.15% of 135.00 |
| HIS A 90 | 20.00 | 21.74% of 92.00 |
| ILE A 91 | 55.00 | 67.07% of 82.00 |
| LYS A1016 | 1.00 | 0.87% of 115.00 |
| PHE A1017 | 45.00 | 90.00% of 50.00 |
| MET A1018 | 47.00 | 40.52% of 116.00 |
| TYR A1021 | 7.00 | 8.97% of 78.00 |
| ASP A1063 | 27.00 | 36.49% of 74.00 |
| GLY A1065 | 6.00 | 13.33% of 45.00 |
| LEU A1066 | 32.00 | 55.17% of 58.00 |
| CYS A1104 | 3.00 | 12.50% of 24.00 |
| ARG A1105 | 7.00 | 5.65% of 124.00 |
| PRO A1106 | 29.00 | 37.66% of 77.00 |

CHAIN A DIFF-AREA: 725.0 (6.17% of 11744.0 total AREA for this chain).
TOTAL DIFF-AREA: 725.0 (6.17% of 11744.0 total AREA over all chains)

[0396] The residues having greater than 5 Å² buried surface area and/or greater than 5% buried were considered significantly contacted. These results help describe the regions in VEGF and the regions in the antibodies that contact one another. Together with functional data relating to the binding VEGF presented earlier, common features of the G6 series of antibodies YADS-2 and YADS-3 antibodies can be observed. The binding of antibodies such as Fab-12 and YADS-1 to VEGF resulted in the surface area of G88 being 100% and 95%, respectively, buried whereas the binding of G6, G6-23 and YADS-2 resulted in G88 being only 66% or less buried.

[0397] The Fab frameworks were essentially unchanged in comparison with the structure of the parental Fab4D5; the C_{α} atoms of the YADS1 and YADS2 frameworks superimposed with Fab4D5 with root mean square deviations (rmsd) of 0.87 and 0.55 Å, respectively. The Cα atoms of the hVEGF molecules in the two structures superimpose well onto each other with rmsds of 0.7 Å for 87 Cα positions. The largest deviation of 3.7 Å occurs at residue glutamic acid 64. The loop containing this residue has inherent flexibility as shown by Muller et al., supra.

[0398] In both complexes, antigen recognition was entirely mediated by contacts with the CDR loops. In terms of buried surface area, YADS1 used both the heavy (498 Å²) and light chain (407 Å²), whereas YADS2 used mostly the heavy chain (543 Å²) and a small contribution from the light chain (157 Å²). Notably, residues at randomized positions accounted for essentially all of the buried surface area (98% and 100% for YADS1 and YADS2, respectively), and furthermore, the buried surface area involved almost entirely side chain atoms (82% and 80% for YADS1 and YADS2, respectively). Thus, both Fabs bound to antigen through interactions that were almost entirely mediated by side chains located at positions that were randomized in the libraries.

[0399] On the hVEGF side, the structural epitopes for binding to YADS1 and YADS2 overlap with each other, and also, with the structural epitope for binding to domain 2 of the hVEGF receptor Flt-1 (Flt-1_{D2},). The YADS1 and YADS2 antibodies can inhibit binding of Flt to human VEGF in vitro (data not shown), and they are expected to inhibit binding of KDR to human VEGF too. Nonetheless, there are significant differences between the structural epitopes for the two Fabs. In particular, of the 11 residues that differ between human and murine VEGF, only residue 88 is in contact with the Fabs, but the interactions involving this residue explain the differing affinities of YADS1 and YADS2 for mVEGF. In the YADS2 complex, Gly88 is partially exposed to solvent, while in the YADS1 complex it is completely buried in the interface. Murine VEGF contains a larger serine residue at position 88; this substitution can be readily accommodated in the YADS2 complex, but in the YADS1 model, the introduction of a serine side chain at the buried Gly88 position would require major rearrangements for the complex to be preserved.

[0400] As described above, both Fabs bind to antigen through contacts almost exclusively involving side chains at varied sites. In total, the CDRs of YADS1 and YADS2 contain 66 residues derived from randomized codons, and these residues are almost equally distributed amongst the four amino acid types allowed in the library design. However, when we consider the subset of residues that make contact with antigen, there is a clear bias in that 16 tyrosines account for 50% of the contact residues. Indeed, all but two of the tyrosines selected in the CDRs of YADS1 and YADS2 make contact with antigen, and all told, tyrosines contribute 71% of the surface area buried upon complexation with hVEGF. Thus, essentially every selected tyrosine side chain is involved in directly mediating antigen recognition and the other selected amino acids apparently play auxiliary roles.

[0401] Despite the predominance of tyrosine in the synthetic antigen-binding sites, an examination of the heavy atom (non-hydrogen) content of buried surface areas reveals that the Fab-hVEGF interfaces are no more hydrophobic than the interface between hVEGF and Flt-1_{D2}. On the hVEGF side, the heavy atom composition of the buried surface area is very similar in all three cases, being composed predominantly of carbon but also containing significant proportions of nitrogen and oxygen. Within the buried surface areas of the Fabs, nitrogen atoms are almost entirely absent, because the side chains allowed in the libraries were composed entirely of carbon, oxygen and hydrogen. Nonetheless, both Fabs bury a large number of oxygen atoms upon binding to hVEGF, and in both cases, the proportion of the buried surface area contributed by carbon is considerably less than that contributed by carbon to the buried surface area of Flt-1_{D2}. Thus, the predominance of tyrosine in the synthetic CDRs does not produce highly hydrophobic Fab-antigen interfaces dominated by aromatic interactions. On the contrary, the tyrosine residues make specific contacts with a wide variety of residues on the hVEGF surface, and these interactions utilize both the side chain hydroxyl groups and aromatic rings.

[0402] Thus, we circumvented the complexity of the natural immune system by using precisely defined synthetic libraries, and as a result, we were able to investigate the special role that tyrosine plays in antigen-binding sites. We generated libraries with restricted diversities and displayed the diverse surfaces on a fixed scaffold formed by the framework regions and buried CDR residues. Our results dramatically demonstrate that, in the context of a suitable scaffold, the tyrosine side chain is capable of mediating most of the contacts necessary for high affinity antigen recognition. Thus, it seems very likely that the overabundance of tyrosine in natural antigen-binding sites is a consequence of the side chain being particularly well suited for making productive contacts with antigen.

[0403] This supposition is also consistent with the chemical nature of tyrosine. As noted previously, the tyrosine side chain is large enough to sweep out large volumes of space with only a few torsion angles, and it can form hydrogen bonds, hydrophobic interactions and attractive electrostatic interactions with positively charged groups (Zemlin, M. et al., (2003) J. Mol. Biol. 334:733-749). In addition, the uncharged tyrosine side chain avoids electrostatic repulsion effects, and its midrange hydrophilicity allows it to adapt favorably to both hydrophilic and hydrophobic environments (Zemlin, (2003), supra; Ivanov, L, et al., (2002) in The Antibodies, eds. Zanetti, M. & Capra, J. (Taylor & Fancis, London, New York), pp. 43-67; Mian, I. S., et al., (1991) J. Mol. Biol. 217:133-151).

[0404] We also observed that, while alanine and serine residues did not make many direct contacts with antigen, they allowed for space and conformational flexibility which may be crucial for appropriate positioning of the large tyrosine side chains. Thus, these small residues may serve an auxiliary function in facilitating productive contacts between tyrosine and antigen. It is worth noting that, perhaps not coincidentally, serine is also highly abundant in natural antigen-binding sites (Mian, (1991), supra). Finally, the paucity of antigen contacts mediated by aspartate suggests that it may be possible to further minimize the chemical diversity of these synthetic antigen-binding sites.

### Example 8

### Anti-VEGF Antibodies from YADS-A and YADS-B Libraries

[0405] (a) Construction of Phage-Displayed Fab Libraries YADS-A and YADS-B

[0406] Two phage displayed libraries (YADS-A and YADS-B) were constructed, as generally described in Example 6, with a previously described phagemid designed to display bivalent Fab moieties dimerized by a leucine zipper domain inserted between the Fab heavy chain and the C-terminal domain of the gene-3 minor coat protein (P3C), except that the following positions of 4D5 were randomized were randomized as follows:

| | Randomized Positions | | |
|---|---|---|---|
| Library | CDRH1 | CDRH2 | CDRH3 |
| YADS-A | 28, 30, 31, 32, 33 | 50, 52, 53, 54, 56, 58 | 95, 96, 97, 98, |
| | | | 99, 100, 100a |
| YADS-B | 28, 30, 31, 32, 33 | 50, 52, 53, 54, 56, 58 | 95, 96, 97, 98, |
| | | | 99, 100, 100a |

[0407] For library YADS-A, two separate mutagenesis reactions were performed. In the first reaction, diversity was introduced into CDR-H1, CDR H2 and CDR-H3 with oligonucleotides YADS-H1, YADS-H2 and YADS-H3-7, respectively. This resulted in the introduction of degenerate codons that encoded for the four amino acids tyrosine, alanine, aspartate, and serine (YADS). In the second reaction, diversity was introduced into CDR-H1, CDR H2 and CDR-H3 with oligonucleotides YTNS-H1, YTNS-H2 and YTNS-H3-7, respectively. This resulted in the introduction of degenerate codons that encoded for the four amino acids tyrosine, threonine, asparagine, and serine (YTNS). The two reactions were pooled.

[0408] For library YADS-B, 13 separate mutagenesis reactions were peformed. The reactions resulted in the introduction of degenerate codons that encoded for the four amino acids tyrosine, alanine, aspartate, and serine (YADS). In each reaction, diversity was introduced into CDR-H1 and CDR-H2 with oligonucleotides YADS-H1 and YADS-H2. For each reaction, one of the following oligonucleotides was used to introduce diversity into CDR-H3: YADS-H3-3, YADS-H3-4, YADS-H3-5, YADS-H3-6, YADS-H3-7, YADS-H3-8, YADS-H3-9, YADS-H3-10, YADS-H3-11, YADS-H3-12, YADS-H3-13, YADS-H3-14, or YADS-H3-15. The 13 reactions were pooled.

[0409] For both libraries, the pooled mutagenesis reactions were electroporated in E. coli SS320 (Sidhu et al., supra). The transformed cells were grown overnight in the presence of M13-KO7 helper phage (New England Biolabs, Beverly, Mass.) to produce phage particles that encapsulated the phagemid DNA and displayed Fab fragments on their surfaces. The size of libraries YADS-A and YADS-B were both 7×10⁹.

[0410] (b) Selection of Anti-hVEGF Specific Antibodies from YADS-A and YADS-B Naïve Libraries.

[0411] Phage from library YADS-A and YADS-B were cycled seperately through rounds of binding selection to enrich for clones binding to h-VEGF. The binding selections were conducted using previously described methods (Sidhu et al., supra).

[0412] NUNC 96-well Maxisorp immunoplates were coated overnight at 4° C. with capture target (5 μg/mL) and blocked for 2 h with BSA (Sigma). After overnight growth at 37° C., phage were concentrated by precipitation with PEG/NaCl and resuspended in PBS, 0.5% BSA, 0.05% Tween 20 (Sigma), as described previously (Sidhu et al., supra). Phage solutions (˜10¹² phage/mL) were added to the coated immunoplates. Following a 2 h incubation to allow for phage binding, the plates were washed 10 times with PBS, 0.05% Tween20. Bound phages were eluted with 0.1 M HCl for 10 min and the eluant was neutralized with 1.0 M Tris base. Eluted phage were amplified in E. coli XL1-blue and used for further rounds of selection.

[0413] The libraries were subjected to 4 rounds of selection against each target protein. Individual clones from each round were grown in a 96-well format in 500 μL of 2YT broth supplemented with carbenicillin and M13-VCS, and the culture supernatants were used directly in phage ELISAs (Sidhu et al., supra) to detect phage-displayed Fabs that bound to plates coated with target protein but not to plates coated with BSA. A clone was considered to be a specific binder if the ELISA signal on target coated plates was at least 20 times greater than that on BSA coated plates.

[0414] Specific binders were sequenced, and the sequences of unique clones are shown in FIGS. 37 and 38 for libraries YADS-A and YADS-B, respectively. Sequences from FIG. 37 were obtained by sorting with human VEGF8-109. Sequences from FIG. 38 were obtained by sorting with murine VEGF

### Example 9

### NNK Variants of YADS2

[0415] (a) Construction of Phage-Displayed Fab Libraries by Randomizing Selected Positions of the YADS2 Anti-VEGF Antibody with the NNK Codon.

[0416] Phage-displayed Fab libraries were constructed using a phagemid vector that resulted in the display of bivalent Fab moieties dimerized by a leucine zipper domain inserted between the Fab heavy chain and the C-terminal domain of the gene-3 minor coat protein (P3C). This vector comprised the YADS2 sequence. The humanized antibody YADS2 variable domains were expressed under the control of the IPTG-inducible Ptac promoter.

[0417] Library NNK was constructed with randomized residues in the heavy chain CDR-3 of YADS2. The specific residues that were randomized are 50, 95, 97, 99, 100, and 100a of the heavy chain.

[0418] At each of the randomized positions, the wild-type codon was replaced by a degenerate NNK codon (N=A/T/G/C, K=G/T in an equimolar ratio) that encoded for all 20 natural amino acids. Libraries were constructed using the method of Kunkel (Kunkel, T. A., Roberts, J. D. & Zakour, R. A., Methods Enzymol. (1987), 154, 367-382) with previously described methods (Sidhu, S. S., Lowman, H. B., Cunningham, B. C. & Wells, J. A., Methods Enzymol. (2000), 328, 333-363). A unique “stop template” version of the Fab display vector was used to generate the NNK library. We used a template phagemid bearing the gene coding for YADS2 fab with TAA stop codons inserted at positions 30, 33, 52, 54, 56, 57, 60, 102, 103, 104, 107, 108 of the heavy chain. Mutagenic oligonucleotides with degenerate NNK codons at the positions to be diversified were used to simultaneously introduce CDR diversity and repair the stop codons. Diversity was introduced into CDR-H3 with the oligonucleotide named NNK-H1 (GCA GCT TCT GGC TTC GCT ATT TAT GAT TAT GAT ATA CAC TGG GTG CGT), NNK-H2 (CTG GAA TGG GTT GCA NNK ATT GCT CCA TAT GCT GGT GCT ACT GCT TAT GCC GAT AGC GTC) and NNK-H3 GTC TAT TAT TGT AGC CGC NNK TCT NNK GCT NNK NNK NNK GCT ATG GAC TAC TGG). The mutagenic oligonucleotides for all three heavy chain CDRs were incorporated simultaneously in a single mutagenesis reaction, so that so that simultaneous incorporation of the mutagenic oligonucleotide resulted in the introduction of the designed diversity at each position and simultaneously repaired all the TAA stop codons, thus generating an open reading frame that encoded a Fab library member fused toga homodimerizing leucine zipper and P3C. Note that the oligonucleotide NNK-H1 does not contain any degenerate codon and is added to the mutagenesis reaction to repair the TAA stop codons and introduce the wild type YADS2 sequence.

[0419] The mutagenesis reactions were electroporated into E. coli SS320 (Sidhu et al., supra), and the transformed cells were grown overnight in the presence of M13-KO7 helper phage (New England Biolabs, Beverly, Mass.) to produce phage particles that encapsulated the phagemid DNA and displayed Fab fragments on their surfaces. Each library contained greater than 5×10⁹ unique members.

[0420] (b) Selection of Specific Anti-VEGF Antibodies from the NNK Library

[0421] Phage from library NNK were cycled through rounds of binding selection to enrich for clones binding to human VEGF. The binding selections were conducted using previously described methods (Sidhu et al., supra).

[0422] NUNC 96-well Maxisorp immunoplates were coated overnight at 4° C. with capture target (5 μg/mL) and blocked for 2 h with Superblock TBS (tris-buffered saline) (Pierce). After overnight growth at 37° C., phage were concentrated by precipitation with PEG/NaCl and resuspended in Superblock TBS, 0.05% Tween 20 (Sigma), as described previously (Sidhu et al., supra). Phage solutions (˜10¹² phage/mL) were added to the coated immunoplates. Following a 2 h incubation to allow for phage binding, the plates were washed 10 times with PBS, 0.05% Tween 20. Bound phage were eluted with 0.1 M HCl for 10 min and the eluant was neutralized with 1.0 M Tris base. Eluted phage were amplified in E. coli XL1-blue and used for further rounds of selection.

[0423] The libraries were subjected to 5 rounds of selection against VEGF. Individual clones from each round of selection were grown in a 96-well format in 500 μL of 2YT broth supplemented with carbenicillin and M13-VCS, and the culture supernatants were used directly in phage ELISAs (Sidhu et al., supra) to detect phage-displayed Fabs that bound to plates coated with target protein but not to plates coated with BSA. Specific binders were defined as those phage clones that exhibited an ELISA signal at least 15-fold greater on target-coated plates in comparison with BSA-coated plates. Individual clones were screened after 3 to 5 rounds of selection for VEGF binding.

[0424] Individual clones representing specific binders were subjected to DNA sequence analysis, and the sequences of the randomized CDR positions are shown in FIG. 40. The affinity of the different YADS variants was estimated by using a “two point competitive phage ELISA”. The three best clones were produced as soluble Fab and were tested for their affinity with respect to hVEGF. BIAcore data was obtained according to Chen et al., J Mol Biol. (1999), 293(4):865-81. Briefly, binding affinities were calculated from association and dissociation rate constants measured using a BIAcore™-3000 surface plasmon resonance system (BIAcore, Inc., Piscataway, N.J.). A biosensor chip was activated for covalent coupling of VEGF using N-ethyl-N′-(3-dimethylaminopropyl)carbodiimide hydrochloride (EDC) and N-hydroxysuccinimide (NHS) according to the supplier's (BIAcore, Inc., Piscataway, N.J.) instructions. hVEGF or mVEGF was buffer-exchanged into 10 mM sodium acetate, pH 4.8 and diluted to approximately 30 mg/ml. Aliquots of VEGF were injected at a flow rate of 2 microL/minute to achieve approximately-200-300 response units (RU) of coupled protein. A solution of 1 M ethanolamine was injected as a blocking agent. For kinetics measurements, twofold serial dilutions of Fab were injected in PBS/Tween buffer (0.05% Tween20 in phosphate-buffered saline) at 25° C. at a flow rate of 10 microL/minute. Equilibrium dissociation constants, Kd values from surface plasmon resonance measurements were calculated as k_{off}/kₒₙ. The BIAcore™ data is summarized as follows:

| Clone Name | hVEGF (nM) | mVEGF (nM) |
|---|---|---|
| NNK-1 | 0.60 | 0.24 |
| NNK-2 | 2.0 | 13 |
| NNK-3 | 6.0 | |

### Example 10

### Binomial Diversity Libraries

[0425] (a) Construction of Phage-Displayed Fab Libraries with CDR Residues Randomized as Only Tyr or Ser

[0426] Phage-displayed Fab libraries were constructed using a phagemid vector that resulted in the display of bivalent Fab moieties dimerized by a leucine zipper domain inserted between the Fab heavy chain and the C-terminal domain of the gene-3 minor coat protein (P3C). This vector comprises the humanized antibody 4D5 variable domains under the control of the IPTG-inducible Ptac promoter as described above. The humanized antibody 4D5 is an antibody which has mostly human consensus sequence framework regions in the heavy and light chains, and CDR regions from a mouse monoclonal antibody specific for Her-2. The method of making the anti-Her-2 antibody and the identity of the variable domain sequences are provided in U.S. Pat. Nos. 5,821,337 and 6,054,297.

[0427] Two libraries were constructed. Library YS-A was constructed with randomized residues in all three heavy chain CDRs, while Library YS-B was constructed with randomized residues in all three heavy chain CDRs and light chain CDR3. The specific residues that were randomized are shown below.

| | Randomized Positions | | | |
|---|---|---|---|---|
| Library | CDRL3 | CDRH1 | CDRH2 | CDRH3 |
| YS-A | | 28, 30, 31, | 50, 52, 53, 54, | 95, 96, 97, 98, 99, |
| | | 32, 33 | 56, 58 | 100, 100a |
| YS-B | 91-94, 96 | 28, 30, 31, | 50, 52, 53, 54, | 95, 96, 97, 98, 99, |
| | | 32, 33 | 56, 58 | 100, 100a |

[0428] At each of the randomized positions, the wild-type codon was replaced by a degenerate TMT codon (M=A/C in an equimolar ratio) that encoded for Tyr and Ser in an equimolar ratio. In addition, the length of CDRH3 was varied by using oligonucleotides that replaced the 7 wild-type codons between positions 101 to 107 with varying numbers of TMT codons (7 to 20 for Library YS-A and 7 to 15 for Library YS-B). In addition, the CDRL3 of Library YS-B was randomized so that 50% of the library members contained a deletion at position number 91 while the other 50% contained the wildtype Gln residue at this position.

[0429] Libraries were constructed using the method of Kunkel (Kunkel, T. A., Roberts, J. D. & Zakour, R. A., Methods Enzymol. (1987), 154, 367-382) with previously described methods (Sidhu, S. S., Lowman, H. B., Cunningham, B. C. & Wells, J. A., Methods Enzymol. (2000), 328, 333-363). A unique “stop template” version of the Fab display vector was used to generate both libraries YS-A and YS-B. We used a template phagemid designated pV0350-4 with TAA stop codons inserted at positions 30, 33, 52, 54,56, 57, 60, 102, 103, 104, 107, 108 of the heavy chain. No stops were introduced in the light chain CDR3. Mutagenic oligonucleotides with degenerate TMT codons at the positions to be diversified were used to simultaneously introduce CDR diversity and repair the stop codons. For both libraries, diversity was introduced into CDR-H1 and CDR-H2 with oligonucleotides H1 and H2, respectively. For Library YS-A, diversity was introduced into CDR-H3 with an equimolar mixture of oligonucleotides. For library YS-B, diversity was introduced into CDR-H3 with an equimolar mixture of oligonucleotides. For library YS-B, diversity was introduced into CDR-L3 with an equimolar mixture of oligonucleotides. The mutagenic oligonucleotides for all CDRs to be randomized were incorporated simultaneously in a single mutagenesis reaction, so that simultaneous incorporation of all the mutagenic oligonucleotides resulted in the introduction of the designed diversity at each position and simultaneously repaired all the TAA stop codons, thus generating an open reading frame that encoded a Fab library member fused to a homodimerizing leucine zipper and P3C.

[0430] The mutagenesis reactions were electroporated into E. coli SS320 (Sidhu et al., supra), and the transformed cells were grown overnight in the presence of M13-KO7 helper phage (New England Biolabs, Beverly, Mass.) to produce phage particles that encapsulated the phagemid DNA and displayed Fab fragments on their surfaces. Each library contained greater than 5×10⁹ unique members.

[0431] (b) Selection of Specific Antibodies from the Naïve Libraries YS-A and YS-B

[0432] Phage from library YS-A or YS-B were cycled through rounds of binding selection to enrich for clones binding to targets of interest. Target proteins, human VEGF₈₋₁₀₉ and murine VEGF were analyzed separately with each library. The binding selections were conducted using previously described methods (Sidhu et al., supra).

[0433] NUNC 96-well Maxisorp immunoplates were coated overnight at 4° C. with capture target (5 μg/mL) and blocked for 2 h with Superblock TBS (tris-buffered saline) (Pierce). After overnight growth at 37° C., phage were concentrated by precipitation with PEG/NaCl and resuspended in Superblock TBS, 0.05% Tween 20 (Sigma), as described previously (Sidhu et al., supra). Phage solutions (˜10¹² phage/mL) were added to the coated immunoplates. Following a 2 h incubation to allow for phage binding, the plates were washed 10 times with PBS, 0.05% Tween 20. Bound phage were eluted with 0.1 M HCl for 10 min and the eluant was neutralized with 1.0 M Tris base. Eluted phage were amplified in E. coli XL1-blue and used for further rounds of selection.

[0434] The libraries were subjected to 5 rounds of selection against each target protein, and at each round, titers were obtained for phage binding to either the target protein or blank wells coated with Superblock TBS. The titer of phage bound to target-coated wells divided by the titer of phage bound to the blank wells was defined as an enrichment ratio used to quantify specific binding of phage pools to the target protein; larger enrichment ratios indicate higher specific binding. The enrichment ratios were observed after 3, 4, or 5 rounds of selection.

[0435] Individual clones from each round of selection were grown in a 96-well format in 500 μL of 2YT broth supplemented with carbenicillin and M13-VCS, and the culture supernatants were used directly in phage ELISAs (Sidhu et al., supra) to detect phage-displayed Fabs that bound to plates coated with target protein but not to plates coated with BSA. Specific binders were defined as those phage clones that exhibited an ELISA signal at least 15-fold greater on target-coated plates in comparison with BSA-coated plates. Individual clones were screened after 2 rounds of selection for binding to human VEGF or after 5 rounds of selection for the other target proteins. These data were used to calculate the percentage of specific binders, and the results for each library against each target protein. Each library produced binders against each target protein.

[0436] Individual clones representing specific binders were subjected to DNA sequence analysis, and the sequences of the randomized CDR positions are shown in FIG. 41. It can be seen that, for each target protein, it was possible to select specific binders that contained only Tyr or Ser at the randomized positions (although some non-designed mutations were observed, which were likely created during library construction probably due to impurities in the oligonucleotides). Furthermore, the sequences of specific binders were unique to the target protein against which they were selected.

[0437] Two of the binders listed in FIG. 41 (hVEGF binder #3 and #18) were tested for their affinity with respect to hVEGF and mVEGF. BIAcore data was obtained according to Chen et al., J. Mol Biol. (1999), 293(4):865-81. Briefly, binding affinities of hVEGF binder #3 and #18 for hVEGF and mVEGF were calculated from association and dissociation rate constants measured using a BIAcore™-2000 surface plasmon resonance system (BIAcore, Inc., Piscataway, N.J.). A biosensor chip was activated for covalent coupling of VEGF using N-ethyl-N′-(3-dimethylaminopropyl)-carbodiimide hydrochloride (EDC) and N-hydroxysuccinimide (NHS) according to the supplier's (BIAcore, Inc., Piscataway, N.J.) instructions. hVEGF or mVEGF was buffer-exchanged into 10 mM sodium acetate, pH 4.8 and diluted to approximately 30 mg/ml. Aliquots of VEGF were injected at a flow rate of 2 microL/minute to achieve approximately 200-300 response units (RU) of coupled protein. A solution of 1 M ethanolamine was injected as a blocking agent. For kinetics measurements, twofold serial dilutions of Fab were injected in PBS/Tween buffer (0.05% Tween20 in phosphate-buffered saline) at 25° C. at a flow rate of 10 microL/minute. Equilibrium dissociation constants, Kd values from surface plasmon resonance measurements were calculated as k_{off}/kₒₙ. The BIAcore™ data is summarized below

| | hVEGF coated on | mVEGF coated |
|---|---|---|
| | the chip | on the chip |
| Clone #3 | | |
| kₐ (M⁻¹ · s⁻¹)(on-rate) | 1.6 × 10⁶ | Not detectable |
| k_{d} (s⁻¹) (off-rate) | 7 × 10⁻² | Not detectable |
| Kd | 46 +/− 17 nM | Not detectable |
| | | (>1 uM) |
| Clone #18 | | |
| kₐ (M⁻¹ · s⁻¹)(on-rate) | 1 × 10⁵ | 4 × 10⁴ |
| k_{d} (s⁻¹) (off-rate) | 8 × 10⁻³ | 2 × 10⁻² |
| Kd | 64 +/− 7 nM | 600 +/− 200 nM |

### Example 11

### Additional Anti-VEGF YS Antibodies

[0438] Library construction and sorting. A phagemid designed to display bivalent Fab4D5 on the surface of M13 bacteriophage was used to construct libraries, as described above. Oligonucleotide-directed mutagenesis was used to replace CDR positions with TMT degenerate codons, (M=A/C in equal proportions). The positions chosen for randomization were as follows:

| | Randomized Positions | | | |
|---|---|---|---|---|
| Library | CDRL3 | CDRH1 | CDRH2 | CDRH3 |

| | | | | |
|---|---|---|---|---|
| YS-A | | 28, 30, 31, | 50, 52, 53, 54, | 95-100 replaced |
| | | 32, 33 | 56, 58 | with 7-20 residues |
| YS-B | 91-94, 96 | 28, 30, 31, | 50, 52, 53, 54, | 95-100a replaced |
| | | 32, 33 | 56, 58 | with 7-15 residues. |

In CDR-H3, positions 95 through 100a were replaced with random loops of all possible lengths ranging from 7 to 20 residues (library A) or 7 to 15 residues (library B). Each library contained ˜10¹⁰ unique members, and thus, the actual library diversities were comparable to the maximum number of unique sequences encoded by the library designs (4×10⁹).

[0439] Phage from the libraries were cycled through rounds of binding selection with antigen immobilized on 96-well Maxisorp immunoplates (NUNC) as the capture target, as described previously (Sidhu, S. S., et al., (2000) Methods Enzymol. 328:333-363). After five rounds of selection, phage were produced from individual clones grown in a 96-well format and the culture supernatants were used in phage ELISAs to detect specific binding clones. Specific binding clones were determined to be Fab-phage that bound to the cognate antigen but did not exhibit detectable binding to seven other proteins.

[0440] Competitive phage ELISA. A modified phage ELISA was used to estimate the binding affinities of Fabs (Sidhu, (2000), supra; Deshayes, K, et al., (2002) Chem. Biol. 9:495-505). Phage ELISAs were carried out on plates coated with antigen, as described above. Phage displaying antibody fragments were serially diluted in PBS, 0.5% (w/v) BSA, 0.1% (v/v) Tween 20, and binding was measured to determine a phage concentration giving ˜50% of the signal at saturation. A fixed, sub-saturating concentration of phage was preincubated for 2 hours with serial dilutions of antigen and then transferred to assay plates coated with antigen. After 15 minutes incubation, the plates were washed with PBS, 0.05% Tween 20 and incubated 30 minutes with horseradish peroxidase/anti-M13 antibody conjugate (1:5000 dilution) (Pharmacia). The plates were washed, developed with TMB substrate (Kirkegaard and Perry Laboratories), quenched with 1.0 M H₃PO₄, and read spectrophotometrically at 450 nm. The binding affinities of the Fabs were determined as IC50 values defined as the concentration of antigen that blocked 50% of the phage binding to the immobilized antigen. DNA sequencing of 184 binding clones revealed 63 unique sequences shown in FIG. 42. Interestingly, the clones from library B exhibit homology within the selected CDR-L3 and CDR-H3 sequences. In contrast, the CDR-H3 sequences of the clones from library A exhibit homology amongst themselves but are very different from the sequences from library B. Thus, it appears that the nature of the CDR-L3 sequence influenced the selection of CDR-H3 sequences, and as a result, two distinct classes of anti-hVEGF antibodies arose from the two different libraries. The clones were screened by competitive phage ELISA and exhibited IC50 values ranging from approximately 60 nM to greater than 5 μM.

[0441] Protein purification and affinity analysis. The three anti-hVEGF clones with the highest estimated affinities (top three sequences in FIG. 42) were purified as free Fab proteins. Fab proteins were purified from E. coli as described previously (Muler, Y. A., et al., (1998) Structure 6:1153-1167). See FIG. 43 for YS1 Fab sequence. The binding kinetics of the purified Fabs (designated Fab-YS1, Fab-YS2 and Fab-YS3) were studied by surface plasmon resonance. Binding kinetics were determined by surface plasmon resonance using a BIAcore™-3000 with hVEGF immobilized on CM5 chips at ˜500 response units, as described previously (Chen, Y., et al., (1999) J. Mol. Biol. 293:865-881). Serial dilutions of Fab proteins were injected, and binding responses were corrected by subtraction of responses on a blank flow cell. For kinetic analysis, a 1:1 Langmuir model of global fittings of kₒₙ and k_{off} was used. The K_{d} values were determined from the ratios of kₒₙ and k_{off}.

| | YS1 | YS2 | YS3 |
|---|---|---|---|
| kₐ (10⁴ · M₋₁ · s⁻¹) | 5 ± 1 | 6 ± 1 | 5 ± 1 |
| kd (10⁻³ · s⁻¹) | 2.8 ± 0.1 | 11.7 ± 0.4 | 9.4 ± 0.1 |
| K_{D} (nM) | 60 ± 20 | 220 ± 60 | 190 ± 40 |

Fab-YS1 exhibited the highest affinity for hVEGF (K_{d}=60 nM), while the other two Fabs bound approximately 5-fold less tightly due to faster off rates. The sequences of Fab-YS1 and Fab-YS2 differ in only three positions, and thus, these three differences account for the improved affinity of Fab-YS1 in comparison with Fab-YS2.

[0442] Immunohistochemistry. We next investigated the specificity of Fab-YS1 by using the protein to visualize VEGF in mammalian cells transfected with a gene encoding for VEGF fused to green fluorescent protein (GFP). Human A673 cells expressing murine VEGF-GFP were stained and imaged, as described (Peden, A. A., et al., (2004) J. Cell. Biol. 164:1065-1076). In the plus VEGF panel, Fab-YS1 was pre-incubated for 5 minutes with a 5-fold excess of recombinant VEGF before being incubated with the cells. The immunohistochemical staining with Fab-YS1 precisely overlapped with the fluorescence signal from the VEGF-GFP fusion (data not shown). Furthermore, the signal was completely blocked by incubating Fab-YS1 with hVEGF prior to the staining.

[0443] Immunoprecipitation. We also conducted immunoprecipitations of endogenous hVEGF and compared the performance of Fab-YS1 to that of a highly specific, natural anti-hVEGF monoclonal antibody (A4.6.1) (Kim, K. J., et al., (1992) Growth Factors 7:53-64). A673 cells were metabolically labelled and immunoprecipitations were performed from the media, as described (Kim, K. J., et al., supra) using 15 ug of anti-GFP polyclonal antibody (Clontech), Fab-YS1 or monoclonal antibody A4.6.1. The immune complexes were eluted by boiling and resolved by SDS-PAGE on a 14% acrylamide gel under reducing conditions. The gel was dried and then exposed to a phosphoimager plate overnight. Both antibodies immunoprecipitated an identical set of bands that likely represent hVEGF variants generated by alternative mRNA splicing (data not shown). Taken together, these results show that Fab-YS1 binds to hVEGF with high affinity and specificity comparable to that of a natural antibody, even in the complex cellular milieu.

### Example 12

### In Vivo Activities of the Anti-VEGF Antibodies

[0444] G-23 inhibits neonate mouse growth and survival. Newborn mice (C57/BL6) were intra-peritoneally (i.p.) injected daily at 1 day post-natally with G6-23 IgG (50 mg/kg) or Flt-1(1-3) Fc (50 mg/kg), or appropriate controls, gp120-Fc, PBS or no injection. The body weights were measured daily and the survival rate of the mice were counted. As shown in FIG. 10, G6-23 reduced body weight equal potently as mFlt-1(1-3) Fc, which is a known mVEGF antagonist. Moreover, mouse survival rates were also equivalent between the two groups. Significantly, the results of G6-23 specifically indicated that mVEGF is required for the growth and survival of new born mice, whereas the effect of Flt-1(1-3) Fc is less specific since it is known to block not only mVEGF, but also placental growth factor (PIGF) and VEGF-B.

[0445] G6-23 effectively inhibits the growth of xenograft tumors in nude mice. KM12 and SW480, two human colon-rectal cancer cell lines, were grown in cell culture first and about 10⁶ cells from each cell line were injected into host nude mice. When the tumor reached approximately 100 mm³ in size (1 week after injection), G6-23 or control were injected (10 mg/kg) twice weekly (six nude mice were used for each group). The tumor sizes were measured till day 13 after antibody injection. As shown in FIG. 11, G6-23 was significantly effective in reducing tumor volumes of both KM12 (left graph) and SW480 (right graph) cell lines.

[0446] Gene expressions for both hVEGF and mVEGF were examined in KM12 xenograft mice. Samples of tumors and surrounding tissues were extracted and Tagman was used to quantify the gene expression levels. In these xenograft models, hVEGF came from the implanted human KM12 tumor cells, whereas mVEGF came from surrounding host stromal cells. As shown in FIG. 12, samples from mice treated with G6-23 on day 3 and day 13 had higher gene expression levels for both hVEGF and mVEGF compared to the control groups. The results indicate that while mouse treated with G6-23 had reduced tumor growth and much decreased vascularity, expressions of both mVEGF and hVEGF were up-regulated in response to the reduction of angiogenesis. It also indicates that at the tumor site, there is significant infiltration of mouse stromal cells, which is a major source of VEGF for the tumor angiogenesis. Therefore, in a preclinical animal model such as the xenograft model described herein, an antibody capable of cross-reacting and blocking both hVEGF and mVEGF is necessary for studying its efficacy.

[0447] Mouse (Lewis) lung carcinoma (LL2) cells were also used in a nude mice model to test the inhibitory effect of G6-23. About 10⁶ cells LL2 cells in a matrigel formulation were administered subcutaneously in the flank of 5-week old beige nude mice. One group of six mice were then treated with G6-23 at 10 mg/kg, injected via i.p. twice weekly for a span of 19 days. Other control agents (i.e., mFlt(1-3)-IgG, rag-10) were also used to treat groups of six mice. As shown in FIG. 13, G6-23 significantly reduced the rate of tumor growth with a pharmacological effect comparable to that of mFlt(1-3)-IgG, which is known to be multi-potent in blocking not only mVEGF, but also other angiogenic factors mPIGF and mVEGF-B. Serum levels of bioactive G6-23 was also measured The result indicates that its levels (62-121 ug/ml) are well within the expected range for a therapeutic neutralizing anti-VEGF antibody.

[0448] HM-7 cells (American Type Culture Collection) were also used to study the tumor growth inhibition in nude mice. G6 IgG antibody, G6-31 IgG antibody, the Avastin™ antibody, the Y0317 IgG antibody used in this study were expressed in and purified from CHO cells. HM-7 cells were maintained in culture with F12:DMEM medium, supplemented with 10% FBS and 1% penicillin-streptomycin and 1% Glutamine. Cells were grown at 37° C. in 5% CO2 until confluence, harvested, counted, and washed and resuspended in sterile Metrigel at a concentration of 25×10⁶ cells per ml. Xenografts were established in 4- to 6-week-old female Beige Nude XID mice by injecting 5×10⁶ of HM-7 cultured cells into the dorsal flank of the mice and allowed to grow. After 48 hours, the tumors were palpable in all mice, and cohorts were randomly selected (n=10) to provide day-0 controls. The remaining mice were divided into 23 groups and injected twice weekly with different anti-VEGF antibodies. The treatments for the study groups are as follows: Group A (n=10×5): mice treated with control antibody MAB (an anti-ragweed antibody) in 0.1 ml by interperitoneal injection twice/week with a high dose (5 mg/kg). Group B (n=10×5): mice treated with G6 IgG antibody in 0.1 ml by interperitoneal injection twice/week with the same dose (0.1, 0.25, 0.5, 2 or 5 mg/kg). Group C (n=10×5): mice treated with Y0317 IgG antibody in 0.1 ml by interperitoneal injection twice/week with the same dose (0.1, 0.25, 0.5, 2 or 5 mg/kg). Group D (n=10×5): mice treated with the Avastin™ antibody in 0.1 ml by interperitoneal injection twice/week with the same dose (0.1, 0.25, 0.5, 2 or 5 mg/kg). Group E (n=10×5): mice treated with G6-31 IgG antibody in 0.1 ml by interperitoneal injection twice/week with the same dose (0.1, 0.25, 0.5, 2 or 5 mg/kg). The mice (n=10 control and treated animals) were killed at day 4, 7, 11, 14, 17 and 21 after initiation of injections, and the tumors were excised and weighed.

[0449] The results show that there was a significant suppression of tumor growth when the G6, G6-31, Y0317 and the Avastin™ antibodies were administered (p<0.5) (FIGS. 33A-E). The excised tissues from the anti-VEGF antibody treated mice were smaller in size and less vascularized as compared to the tumors excised from the control mice. As discussed above, the G6 and the G6-23 antibody unlike the Avastin™ antibody and the Y0317 antibody can bind to both human VEGF and mouse VEGF, including mouse stromal VEGF which can be upregulated upon implantation of human colorectal tumors in mouse models. Direct comparison of the activity of the G6 and G6-31 antibodies, which antibodies bind similar epitopes, indicates that at most datapoints the antibody with the higher affinity for VEGF-A, the G6-31 antibody, had increased tumor growth inhibiting properties.

The application's sequence listing, which the Patent Office published only in electronic form, follows.

SEQUENCE LISTING (928 sequences)

SEQ ID NO: 1 - protein, 6 aa, Artificial
  CDR-H2
  MISC_FEATURE (2)..(2): Xaa is Ile, Val, or any other hydrophobic amino acid
  MISC_FEATURE (5)..(5): Xaa is any amino acid
GXTPXG

SEQ ID NO: 2 - protein, 5 aa, Artificial
  CDR-H1
  MISC_FEATURE (1)..(1): Xaa is any amino acid
  MISC_FEATURE (2)..(2): Xaa is Tyr or Phe
  MISC_FEATURE (3)..(3): Xaa is Trp or Leu
XXXIH

SEQ ID NO: 3 - DNA, 51 bp, Artificial
  Oligonucleotide
  misc_feature (22)..(22): k is independently g or t
  misc_feature (26)..(26): m is independently a or c
  misc_feature (28)..(28): k is independently g or t
  misc_feature (29)..(29): m is independently a or c
  misc_feature (31)..(31): k is independently g or t
  misc_feature (32)..(32): s is g or c
gcagcttctggcttcaccattkccgmtkmtksgatacactgggtgcgtcag

SEQ ID NO: 4 - DNA, 72 bp, Artificial
  Oligonucleotide
  misc_feature (23)..(23): s is g or c
  misc_feature (28)..(28): r is a or g
  misc_feature (35)..(35): s is independently g or c
  misc_feature (38)..(38): s is independently g or c
  misc_feature (43)..(43): k is independently g or t
  misc_feature (44)..(44): m is a or c
  misc_feature (49)..(49): k is independently g or t
  misc_feature (50)..(50): m is a or c
aagggcctggaatgggttgcagstattrctcctgstgstggtkmtactkmttatgccgatagcgtcaagggc

SEQ ID NO: 5 - DNA, 66 bp, Artificial
  Oligonucleotide
  misc_feature (25)..(25): k is independently g or t
  misc_feature (26)..(26): y is independently c or t
  misc_feature (29)..(29): y is independently c or t
  misc_feature (31)..(31): k is independently g or t
  misc_feature (32)..(32): y is independently c or t
  misc_feature (34)..(34): k is independently g or t
  misc_feature (35)..(35): y is independently c or t
  misc_feature (37)..(37): s is independently g or c
  misc_feature (38)..(38): y is independently c or t
  misc_feature (40)..(40): s is independently g or c
  misc_feature (43)..(43): k is independently g or t
  misc_feature (44)..(44): m is a or c
actgccgtctattattgtgcacgckytgytkytkytsytscakmtgctatggactactggggtcaa

SEQ ID NO: 6 - DNA, 55 bp, Artificial
  Oligonucleotide
  misc_feature (16)..(16): s is independently g or c
  misc_feature (17)..(17): m is independently a or c
  misc_feature (20)..(20): m is independently a or c
  misc_feature (23)..(23): y is c or t
  misc_feature (25)..(25): k is g or t
  misc_feature (28)..(28): r is a or g
  misc_feature (32)..(32): s is independently g or c
acctgccgtgccagtsmagmtgytkccrctgstgtagcctggtatcaacagaaac

SEQ ID NO: 7 - DNA, 54 bp, Artificial
  Oligonucleotide
  misc_feature (16)..(16): k is independently g or t
  misc_feature (17)..(17): m is independently a or c
  misc_feature (19)..(19): k is independently g or t
  misc_feature (28)..(28): k is independently g or t
  misc_feature (29)..(29): y is c or t
  misc_feature (34)..(34): k is independently g or t
  misc_feature (35)..(35): m is independently a or c
ccgaagcttctgattkmtkccgcatcckytctckmttctggagtcccttctcgc

SEQ ID NO: 8 - DNA, 57 bp, Artificial
  Oligonucleotide
  misc_feature (16)..(16): s is independently g or c
  misc_feature (17)..(17): m is independently a or c
  misc_feature (22)..(22): k is independently g or t
  misc_feature (25)..(25): k is independently g or t
  misc_feature (26)..(26): m is independently a or c
  misc_feature (28)..(28): r is independently a or g
  misc_feature (31)..(31): r is independently a or g
  misc_feature (37)..(37): s is independently g or c
gcaacttattactgtsmacaakcckmtrctrctcctscaacgttcggacagggtacc

SEQ ID NO: 9 - DNA, 57 bp, Artificial
  Oligonucleotide
  misc_feature (16)..(16): r is independently a or g
  misc_feature (17)..(17): m is independently a or c
  misc_feature (23)..(23): s is independently g or c
  misc_feature (25)..(25): k is independently g or t
  misc_feature (26)..(26): m is independently a or c
  misc_feature (29)..(29): s is independently g or c
  misc_feature (31)..(31): r is independently a or g
  misc_feature (32)..(32): m is independently a or c
  misc_feature (37)..(37): k is independently g or t
  misc_feature (38)..(38): s is independently g or c
gcaacttattactgtrmacaagstkmtgstrmccctksgacgttcggacagggtacc

SEQ ID NO: 10 - DNA, 51 bp, Artificial
  Oligonucelotide
  misc_feature (22)..(22): k is independently g or t
  misc_feature (27)..(27): m is a or c
  misc_feature (29)..(29): w is a or t
  misc_feature (31)..(31): y is c or t
  misc_feature (32)..(32): k is independently g or t
gcagcttctggcttcaccattkccgamtwcykgatacactgggtgcgtcag

SEQ ID NO: 11 - DNA, 72 bp, Artificial
  Oligonucleotide
  misc_feature (23)..(23): s is independently g or c
  misc_feature (25)..(25): r is a or g
  misc_feature (29)..(29): s is independently g or c
  misc_feature (31)..(31): s is independently g or c
  misc_feature (34)..(34): k is g or t
  misc_feature (38)..(38): s is independently g or c
  misc_feature (41)..(41): s is independently g or c
  misc_feature (44)..(44): w is independently a or t
  misc_feature (47)..(47): s is independently g or c
  misc_feature (50)..(50): w is independently a or t
aagggcctggaatgggttgcagstrttascscakctgstgsttwcasctwctatgccgatagcgtcaagggc

SEQ ID NO: 12 - DNA, 66 bp, Artificial
  Oligonucleotide
  misc_feature (26)..(26): w is independently a or t
  misc_feature (28)..(28): r is a or g
  misc_feature (32)..(32): w is independently a or t
  misc_feature (35)..(35): w is independently a or t
  misc_feature (37)..(37): m is a or c
  misc_feature (40)..(40): s is g or c
  misc_feature (44)..(44): w is independently a or t
actgccgtctattattgtgcacgctwcrtttwctwcmtcscatwcgctatggactactggggtcaa

SEQ ID NO: 13 - DNA, 55 bp, Artificial
  Oligonucleotide
  misc_feature (16)..(16): s is independently g or c
  misc_feature (21)..(21): m is a or c
  misc_feature (22)..(22): r is a or g
  misc_feature (25)..(25): k is independently g or t
  misc_feature (29)..(29): s is independently g or c
  misc_feature (31)..(31): k is independently g or t
acctgccgtgccagtsaagamrttkccasckctgtagcctggtatcaacagaaac

SEQ ID NO: 14 - DNA, 54 bp, Artificial
  Oligonucleotide
  misc_feature (17)..(17): w is independently a or t
  misc_feature (19)..(19): k is g or t
  misc_feature (29)..(29): w is independently a or t
  misc_feature (35)..(35): w is independently a or t
ccgaagcttctgatttwckccgcatcctwcctctwctctggagtcccttctcgc

SEQ ID NO: 15 - DNA, 57 bp, Artificial
  Oligonucleotide
  misc_feature (16)..(16): v is independently a, c, or g
  misc_feature (18)..(18): r is independently a or g
  misc_feature (19)..(19): v is independently a, c, or g
  misc_feature (21)..(21): r is independently a or g
  misc_feature (22)..(22): k is g or t
  misc_feature (26)..(26): w is a or t
  misc_feature (29)..(29): s is independently g or c
  misc_feature (32)..(32): s is independently g or c
  misc_feature (37)..(37): s is independently g or c
gcaacttattactgtvarvarkcctwcascasccctscaacgttcggacagggtacc

SEQ ID NO: 16 - DNA, 57 bp, Artificial
  Oligonucleotide
  misc_feature (16)..(16): v is independently a, c, or g
  misc_feature (18)..(18): r is independently a or g
  misc_feature (19)..(19): v is independently a, c, or g
  misc_feature (21)..(21): r is independently a or g
  misc_feature (23)..(23): s is g or c
  misc_feature (26)..(26): w is a or t
  misc_feature (28)..(28): k is independently g or t
  misc_feature (31)..(31): r is independently a or g
  misc_feature (38)..(38): k is independently g or t
gcaacttattactgtvarvargsttwckctracccttkgacgttcggacagggtacc

SEQ ID NO: 17 - protein, 14 aa, Artificial
  Epitope tag
MADPNRFRGKDLGG

SEQ ID NO: 18 - protein, 35 aa, Artificial
  Leucine zipper
GRMKQLEDKVEELLSKNYHLENEVARLKKLVGERG

SEQ ID NO: 19 - protein, 213 aa, Artificial
  YADS1 Fab light chain
DIQMTQSPSSLSASVGDRVTITCRASQASYSSVAWYQQKPGKAPKLLIYAASYLYSGVPSRFSGSGSGTDFTLTISSLQPEDFATYYCQSSASPATFGQGTKVEIKRTVAAPSVFIFPPSDEQLKSGTASVVCLLNNFYPREAKVQWKVDNALQSGNSQESVTEQDSKDSTYSLSSTLTLSKADYEKHKVYACEVTHQGLSSPVTKSFNRGEC

SEQ ID NO: 20 - protein, 252 aa, Artificial
  YADS1 Fab heavy chain
MKKNIAFLLASMFVFSIATNAYAEVQLVESGGGLVQPGGSLRLSCAASGFDIYDDDIHWVRQAPGKGLEWVAYIAPSYGYTDYADSVKGRFTISADTSKNTAYLQMNSLRAEDTAVYYCSRSSDASYSYSAMDYWGQGTLVTVSSASTKGPSVFPLAPSSKSTSGGTAALGCLVKDYFPEPVTVSWNSGALTSGVHTFPAVLQSSGLYSLSSVVTVPSSSLGTQTYICNVNHKPSNTKVDKKVEPKSCDKTH

SEQ ID NO: 21 - protein, 214 aa, Artificial
  YADS2 Fab light chain
DIQMTQSPSSLSASVGDRVTITCRASQSYAYAVAWYQQKPGKAPKLLIYDASYLYSGVPSRFSGSGSGTDFTLTISSLQPEDFATYYCQQAYSSPDTFGQGTKVEIKRTVAAPSVFIFPPSDEQLKSGTASVVCLLNNFYPREAKVQWKVDNALQSGNSQESVTEQDSKDSTYSLSSTLTLSKADYEKHKVYACEVTHQGLSSPVTKSFNRGEC

SEQ ID NO: 22 - protein, 250 aa, Artificial
  YADS2 Fab heavy chain
MKKNIAFLLASMFVFSIATNAYAEVQLVESGGGLVQPGGSLRLSCAASGFAISDYDIHWVRQAPGKGLEWVADIAPYAGATAYADSVKGRFTISADTSKNTAYLQMNSLRAEDTAVYYCSRSSYAYYAAMDYWGQGTLVTVSSASTKGPSVFPLAPSSKSTSGGTAALGCLVKDYFPEPVTVSWNSGALTSGVHTFPAVLQSSGLYSLSSVVTVPSSSLGTQTYICNVNHKPSNTKVDKKVEPKSCDKTH

SEQ ID NO: 23 - protein, 214 aa, Artificial
  YADS3 Fab light chain
DIQMTQSPSSLSASVGDRVTITCRASQASYYDVAWYQQKPGKAPKLLIYAASYLYSGVPSRFSGSGSGTDFTLTISSLQPEDFATYYCQQYYYAPATFGQGTKVEIKRTVAAPSVFIFPPSDEQLKSGTASVVCLLNNFYPREAKVQWKVDNALQSGNSQESVTEQDSKDSTYSLSSTLTLSKADYEKHKVYACEVTHQGLSSPVTKSFNRGEC

SEQ ID NO: 24 - protein, 250 aa, Artificial
  YADS3 Fab heavy chain
MKKNIAFLLASMFVFSIATNAYAEVQLVESGGGLVQPGGSLRLSCAASGFSISDYDIHWVRQAPGKGLEWVAAIAPYSGSTYYADSVKGRFTISADTSKNTAYLQMNSLRAEDTAVYYCSRSSYAYYSAMDYWGQGTLVTVSSASTKGPSVFPLAPSSKSTSGGTAALGCLVKDYFPEPVTVSWNSGALTSGVHTFPAVLQSSGLYSLSSVVTVPSSSLGTQTYICNVNHKPSNTKVDKKVEPKSCDKTH

SEQ ID NO: 25 - DNA, 48 bp, Artificial
  Oligonucleotide
gcagcttctggcttcgctatttatgattatgatatacactgggtgcgt

SEQ ID NO: 26 - DNA, 60 bp, Artificial
  Oligonucleotide
  misc_feature (16)..(17): n is independently a, t, g, or c
  misc_feature (18)..(18): k is g or t
ctggaatgggttgcannkattgctccatatgctggtgctactgcttatgccgatagcgtc

SEQ ID NO: 27 - DNA, 54 bp, Artificial
  Oligonucleotide
  misc_feature (19)..(20): n is independently a, t, g, or c
  misc_feature (21)..(21): k is independently g or t
  misc_feature (25)..(26): n is independently a, t, g, or c
  misc_feature (27)..(27): k is independently g or t
  misc_feature (31)..(32): n is independently a, t, g, or c
  misc_feature (33)..(33): k is independently g or t
  misc_feature (34)..(35): n is independently a, t, g, or c
  misc_feature (36)..(36): k is independently g or t
  misc_feature (37)..(38): n is independently a, t, g, or c
  misc_feature (39)..(39): k is independently g or t
gtctattattgtagccgcnnktctnnkgctnnknnknnkgctatggactactgg

SEQ ID NO: 28 - protein, 214 aa, Artificial
  G6 Fab light chain
DIQMTQSPSSLSASVGDRVTITCRASQDVSTAVAWYQQKPGKAPKLLIYSASFLYSGVPSRFSGSGSGTDFTLTISSLQPEDFATYYCQQSYTTPPTFGQGTKVEIKRTVAAPSVFIFPPSDEQLKSGTASVVCLLNNFYPREAKVQWKVDNALQSGNSQESVTEQDSKDSTYSLSSTLTLSKADYEKHKVYACEVTHQGLSSPVTKSFNRGEC

SEQ ID NO: 29 - protein, 226 aa, Artificial
  G6 Fab heavy chain
EVQLVESGGGLVQPGGSLRLSCAASGFTISDYWIHWVRQAPGKGLEWVAGITPAGGYTYYADSVKGRFTISADTSKNTAYLQMNSLRAEDTAVYYCARFVFFLPYAMDYWGQGTLVTVSSASTKGPSVFPLAPSSKSTSGGTAALGCLVKDYFPEPVTVSWNSGALTSGVHTFPAVQSSGLYSLSSVVTVPSSSLGTQTYICNVNHKPSNTKVDKKVEPKSCDKTH

SEQ ID NO: 30 - protein, 214 aa, Artificial
  G6-23 Fab light chain
DIQMTQSPSSLSASVGDRVTITCRASQDVSTAVAWYQQKPGKAPKLLIYSASFLYSGVPSRFSGSGSGTDFTLTISSLQPEDFATYYCKQGYANPWTFGQGTKVEIKRTVAAPSVFIFPPSDEQLKSGTASVVCLLNNFYPREAKVQWKVDNALQSGNSQESVTEQDSKDSTYSLSSTLTLSKADYEKHKVYACEVTHQGLSSPVTKSFNRGEC

SEQ ID NO: 31 - protein, 227 aa, Artificial
  G6-23 Fab heavy chain
EVQLVESGGGLVQPGGSLRLSCAASGFTISDYWIHWVRQAPGKGLEWVAGITPAGGYTYYADSVKGRFTISADTSKNTAYLQMNSLRAEDTAVYYCARFVFFLPYAMDYWGQGTLVTVSSASTKGPSVFPLAPSSKSTSGGTAALGCLVKDYFPEPVTVSWNSGALTSGVHTFPAVLQSSGLYSLSSVVTVPSSSLGTQTYICNVNHKPSNTKVDKKVEPKSCDKTH

SEQ ID NO: 32 - protein, 214 aa, Artificial
  G6-31 Fab light chain
DIQMTQSPSSLSASVGDRVTITCRASQDVSTAVAWYQQKPGKAPKLLIYSASFLYSGVPSRFSGSGSGTDFTLTISSLQPEDFATYYCQQGYGNPFTFGQGTKVEIKRTVAAPSVFIFPPSDEQLKSGTASVVCLLNNFYPREAKVQWKVDNALQSGNSQESVTEQDSKDSTYSLSSTLTLSKADYEKHKVYACEVTHQGLSSPVTKSFNRGEC

SEQ ID NO: 33 - protein, 214 aa, Artificial
  G6-8 Fab light chain
DIQMTQSPSSLSASVGDRVTITCRASQDVSTAVAWYQQKPGKAPKLLIYSASFLYSGVPSRFSGSGSGTDFTLTISSLQPEDFATYYCQQGAGSPLTFGQGTKVEIKRTVAAPSVFIFPPSDEQLKSGTASVVCLLNNFYPREAKVQWKVDNALQSGNSQESVTEQDSKDSTYSLSSTLTLSKADYEKHKVYACEVTHQGLSSPVTKSFNRGEC

SEQ ID NO: 34 - protein, 214 aa, Artificial
  G6-23.1 Fab light chain
DIQMTQSPSSLSASVGDRVTITCRASQDVSTAVAWYQQKPGKAPKLLIYSASFLYSGVPSRFSGSGSGTDFTLTISSLQPEDFATYYCKQGFANPFTFGQGTKVEIKRTVAAPSVFIFPPSDEQLKSGTASVVCLLNNFYPREAKVQWKVDNALQSGNSQESVTEQDSKDSTYSLSSTLTLSKADYEKHKVYACEVTHQGLSSPVTKSFNRGEC

SEQ ID NO: 35 - protein, 227 aa, Artificial
  G6-23.1 Fab heavy chain
EVQLVESGGGLVQPGGSLRLSCAASGFTISDYWIHWVRQAPGKGLEWVAGVTPAGGYTYYADSVKGRFTISADTSKNTAYLQMNSLRAEDTAVYYCARFVFFLPYAMDYWGQGTLVTVSSASTKGPSVFPLAPSSKSTSGGTAALGCLVKDYFPEPVTVSWNSGALTSGVHTFPAVLQSSGLYSLSSVVTVPSSSLGTQTYICNVNHKPSNTKVDKKVEPKSCDKTH

SEQ ID NO: 36 - protein, 227 aa, Artificial
  G6-23.2 Fab heavy chain
EVQLVESGGGLVQPGGSLRLSCAASGFTISDYWIHWVRQAPGKGLEWVAGVTPAGGYTAYADSVKGRFTISADTSKNTAYLQMNSLRAEDTAVYYCARFVFFLPYAMDYWGQGTLVTVSSASTKGPSVFPLAPSSKSTSGGTAALGCLVKDYFPEPVTVSWNSGALTSGVHTFPAVLQSSGLYSLSSVVTVPSSSLGTQTYICNVNHKPSNTKVDKKVEPKSCDKTH

SEQ ID NO: 37 - protein, 214 aa, Artificial; identical to SEQ ID NO: 28
  B20 Fab light chain

SEQ ID NO: 38 - protein, 228 aa, Artificial
  B20 Fab heavy chain
EVQLVESGGGLVQPGGSLRLSCAASGFTINASWIHWVRQAPGKGLEWVGAIYPYSGYTNYADSVKGRFTISADTSKNTAYLQMNSLRAEDTAVYYCARWGHSTSPWAMDYWGQGTLVTVSSASTKGPSVFPLAPSSKSTSGGTAALGCLVKDYFPEPVTVSWNSGALTSGVHTFPAVLQSSGLYSLSSVVTVPSSSLGTQTYICNVNHKPSNTKVDKKVEPKSCDKTH

SEQ ID NO: 39 - protein, 214 aa, Artificial
  B20-4 Fab light chain
DIQMTQSPSSLSASVGDRVTITCRASQVIRRSLAWYQQKPGKAPKLLIYAASNLASGVPSRFSGSGSGTDFTLTISSLQPEDFATYYCQQSNTSPLTFGQGTKVEIKRTVAAPSVFIFPPSDEQLKSGTASVVCLLNNFYPREAKVQWKVDNALQSGNSQESVTEQDSKDSTYSLSSTLTLSKADYEKHKVYACEVTHQGLSSPVTKSFNRGEC

SEQ ID NO: 40 - protein, 214 aa, Artificial; identical to SEQ ID NO: 39
  B20-4.1 Fab light chain

SEQ ID NO: 41 - protein, 228 aa, Artificial
  B20-4.1 Fab heavy chain
EVQLVESGGGLVQPGGSLRLSCAASGFSINGSWIFWVRQAPGKGLEWVGAIWPFGGYTHYADSVKGRFTISADTSKNTAYLQMNSLRAEDTAVYYCARWGHSTSPWAMDYWGQGTLVTVSSASTKGPSVFPLAPSSKSTSGGTAALGCLVKDYFPEPVTVSWNSGALTSGVHTFPAVLQSSGLYSLSSVVTVPSSSLGTQTYICNVNHKPSNTKVDKKVEPKSCDKTH

SEQ ID NO: 42 - protein, 214 aa, Artificial
  YS1 Fab light chain
DIQMTQSPSSLSASVGDRVTITCRASQSYAYAVAWYQQKPGKAPKLLIYDASYLYSGVPSRFSGSGSGTDFTLTISSLQPEDFATYYCQQSYYSPYTFGQGTKVEIKRTVAAPSVFIFPPSDEQLKSGTASVVCLLNNFYPREAKVQWKVDNALQSGNSQESVTEQDSKDSTYSLSSTLTLSKADYEKHKVYACEVTHQGLSSPVTKSFNRGEC

SEQ ID NO: 43 - protein, 232 aa, Artificial
  YS1 Fab heavy chain
EVQLVESGGGLVQPGGSLRLSCAASGFSISSSSIHWVRQAPGKGLEWVAYISPSSGSTSYADSVKGRFTISADTSKNTAYLQMNSLRAEDTAVYYCSRYYSSSYYYSYYYAMDYWGQGTLVTVSSASTKGPSVFPLAPSSKSTSGGTAALGCLVKDYFPEPVTVSWNSGALTSGVHTFPAVLQSSGLYSLSSVVTVPSSSLGTQTYICNVNHKPSNTKVDKKVEPKSCDKTH

SEQ ID NO: 44 - protein, 11 aa, Artificial
  G6-6a Light chain CDR1
RASQNVATFLA

SEQ ID NO: 45 - protein, 7 aa, Artificial
  G6-6a Light chain CDR2
SASNLAS

SEQ ID NO: 46 - protein, 9 aa, Artificial
  G6-6a Light chain CDR3
QQSYGSLPT

SEQ ID NO: 47 - protein, 214 aa, Artificial
  G6-6a Fab light chain
DIQMTQSPSSLSASVGDRVTITCRASQNVATFLAWYQQKPGKAPKLLIYSASNLASGVPSRFSGSGSGTDFTLTISSLQPEDFATYYCQQSYGSPLTFGQGTKVEIKRTVAAPSVFIFPPSDEQLKSGTASVVCLLNNFYPREAKVQWKVDNALQSGNSQESVTEQDSKDSTYSLSSTLTLSKADYEKHKVYACEVTHQGLSSPVTKSFNRGEC

SEQ ID NO: 48 - protein, 11 aa, Artificial
  G6-23 CDR1 light chain
RASQDVSTAVA

SEQ ID NO: 49 - protein, 7 aa, Artificial
  G6-23 CDR2 light chain
SASFLYS

SEQ ID NO: 50 - protein, 9 aa, Artificial
  G6-23 CDR3 light chain
QQGYANPWT

SEQ ID NO: 51 - protein, 214 aa, Artificial
  G6-23 Fab light chain
DIQMTQSPSSLSASVGDRVTITCRASQDVSTAVAWYQQKPGKAPKLLIYSASFLYSGVPSRFSGSGSGTDFTLTISSLQPEDFATYYCQQGYANPWTFGQGTKVEIKRTVAAPSVFIFPPSDEQLKSGTASVVCLLNNFYPREAKVQWKVDNALQSGNSQESVTEQDSKDSTYSLSSTLTLSKADYEKHKVYACEVTHQGLSSPVTKSFNRGEC

SEQ ID NO: 52 - protein, 9 aa, Artificial
  G6-31 CDR3 light chain
QQGYGNPFT

SEQ ID NO: 53 - protein, 214 aa, Artificial; identical to SEQ ID NO: 32
  G6-31 Fab light chain

SEQ ID NO: 54 - protein, 9 aa, Artificial
  G6-2a CDR3 light chain
QQGYGSPLT

SEQ ID NO: 55 - protein, 214 aa, Artificial
  G6-2a Fab light chain
DIQMTQSPSSLSASVGDRVTITCRASQDVSTAVAWYQQKPGKAPKLLIYSASFLYSGVPSRFSGSGSGTDFTLTISSLQPEDFATYYCQQGYGSPLTFGQGTKVEIKRTVAAPSVFIFPPSDEQLKSGTASVVCLLNNFYPREAKVQWKVDNALQSGNSQESVTEQDSKDSTYSLSSTLTLSKADYEKHKVYACEVTHQGLSSPVTKSFNRGEC

SEQ ID NO: 56 - protein, 11 aa, Artificial
  G6-2b CDR1 light chain
RASQGGTTSLA

SEQ ID NO: 57 - protein, 7 aa, Artificial
  G6-2b CDR2 light chain
SASNLAS

SEQ ID NO: 58 - protein, 9 aa, Artificial
  G6-2b CDR3 light chain
QQGYGSPFT

SEQ ID NO: 59 - protein, 214 aa, Artificial
  G6-2b Fab light chain
DIQMTQSPSSLSASVGDRVTITCRASQGGTTSLAWYQQKPGKAPKLLIYSASNLASGVPSRFSGSGSGTDFTLTISSLQPEDFATYYCQQGYGSPFTFGQGTKVEIKRTVAAPSVFIFPPSDEQLKSGTASVVCLLNNFYPREAKVQWKVDNALQSGNSQESVTEQDSKDSTYSLSSTLTLSKADYEKHKVYACEVTHQGLSSPVTKSFNRGEC

SEQ ID NO: 60 - protein, 11 aa, Artificial
  G6-6b CDR1 light chain
RASQIVTNSLA

SEQ ID NO: 61 - protein, 7 aa, Artificial
  G6-6b CDR2 light chain
LASSLAS

SEQ ID NO: 62 - protein, 9 aa, Artificial
  G6-2b CDR3 light chain
QQGATDPRT

SEQ ID NO: 63 - protein, 214 aa, Artificial
  G6-6b Fab light chain
DIQMTQSPSSLSASVGDRVTITCRASQIVTNSLAWYQQKPGKAPKLLIYLASSLASEVPSRFSGSGSGTDFTLTISSLQPEDFATYYCQQGATDPRTFGQGTKVEIKRTVAAPSVFIFPPSDEQLKSGTASVVCLLNNFYPREAKVQWKVDNALQSGNSQESVTEQDSKDSTYSLSSTLTLSKADYEKHKVYACEVTHQGLSSPVTKSFNRGEC

SEQ ID NO: 64 - protein, 9 aa, Artificial
  G6-48 CDR3 light chain
QQGTSSPPT

SEQ ID NO: 65 - protein, 214 aa, Artificial
  G6-48 Fab light chain
DIQMTQSPSSLSASVGDRVTITCRASQDVSTAVAWYQQKPGKAPKLLIYSASFLYSGVPSRFSGSGSGTDFTLTISSLQPEDFATYYCQQGTSSPPTFGQGTKVEIKRTVAAPSVFIFPPSDEQLKSGTASVVCLLNNFYPREAKVQWKVDNALQSGNSQESVTEQDSKDSTYSLSSTLTLSKADYEKHKVYACEVTHQGLSSPVTKSFNRGEC

SEQ ID NO: 66 - protein, 8 aa, Artificial
  G6-1a CDR3 light chain
QQGTGNPT

SEQ ID NO: 67 - protein, 214 aa, Artificial
  G6-1a Fab light chain
DIQMTQSPSSLSASVGDRVTITCRASQDVSTAVAWYQQKPGKAPKLLIYSASFLYSGVPSRFSGSGSGTDFTLTISSLQPEDFATYYCQQGTGNPPTFGQGTKVEIKRTVAAPSVFIFPPSDEQLKSGTASVVCLLNNFYPREAKVQWKVDNALQSGNSQESVTEQDSKDSTYSLSSTLTLSKADYEKHKVYACEVTHQGLSSPVTKSFNRGEC

SEQ ID NO: 68 - protein, 9 aa, Artificial
  G6-8 CDR3 light chain
QQGAGSPLT

SEQ ID NO: 69 - protein, 214 aa, Artificial; identical to SEQ ID NO: 33
  G6-8 Fab light chain

SEQ ID NO: 70 - protein, 7 aa, Artificial
  G6-3 CDR2 light chain
AASFLYS

SEQ ID NO: 71 - protein, 9 aa, Artificial
  G6-3 CDR3 light chain
QQGSGHPFT

SEQ ID NO: 72 - protein, 214 aa, Artificial
  G6-3 Fab light chain
DIQMTQSPSSLSASVGDRVTITCRASQDVSTAVAWYQQKPGKAPKLLIYAASFLYSGVPSRFSGSGSGTDFTLTISSLQPEDFATYYCQQGSGHPFTFGQGTKVEIKRTVAAPSVFIFPPSDEQLKSGTASVVCLLNNFYPREAKVQWKVDNALQSGNSQESVTEQDSKDSTYSLSSTLTLSKADYEKHKVYACEVTHQGLSSPVTKSFNRGEC

SEQ ID NO: 73 - protein, 9 aa, Artificial
  G6-34 CDR3 light chain
QQGTGSPLT

SEQ ID NO: 74 - protein, 214 aa, Artificial
  G-6-34 Fab light chain
DIQMTQSPSSLSASVGDRVTITCRASQDVSTAVAWYQQKPGKAPKLLIYSASFLYSGVPSRFSGSGSGTDFTLTISSLQPEDFATYYCQQGTGSPLTFGQGTKVEIKRTVAAPSVFIFPPSDEQLKSGTASVVCLLNNFYPREAKVQWKVDNALQSGNSQESVTEQDSKDSTYSLSSTLTLSKADYEKHKVYACEVTHQGLSSPVTKSFNRGEC

SEQ ID NO: 75 - protein, 9 aa, Artificial
  G6-4a CDR3 light chain
QQGSGNPFT

SEQ ID NO: 76 - protein, 214 aa, Artificial
  G6-4a Fab light chain
DIQMTQSPSSLSASVGDRVTITCRASQDVSTAVAWYQQKPGKAPKLLIYSASFLYSGVPSRFSGSGSGTDFTLTISSLQPEDFATYYCQQGSGNPFTFGQGTKVEIKRTVAAPSVFIFPPSDEQLKSGTASVVCLLNNFYPREAKVQWKVDNALQSGNSQESVTEQDSKDSTYSLSSTLTLSKADYEKHKVYACEVTHQGLSSPVTKSFNRGEC

SEQ ID NO: 77 - protein, 9 aa, Artificial
  G6-1a CDR3 light chain
QQGTGNPLT

SEQ ID NO: 78 - protein, 214 aa, Artificial
  G6-1a Fab light chain
DIQMTQSPSSLSASVGDRVTITCRASQDVSTAVAWYQQKPGKAPKLLIYSASFLYSGVPSRFSGSGSGTDFTLTISSLQPEDFATYYCQQGTGNPLTFGQGTKVEIKRTVAAPSVFIFPPSDEQLKSGTASVVCLLNNFYPREAKVQWKVDNALQSGNSQESVTEQDSKDSTYSLSSTLTLSKADYEKHKVYACEVTHQGLSSPVTKSFNRGEC

SEQ ID NO: 79 - protein, 9 aa, Artificial
  G6-4b CDR3 light chain
QQGSGSPFT

SEQ ID NO: 80 - protein, 214 aa, Artificial
  G6-4b Fab light chain
DIQMTQSPSSLSASVGDRVTITCRASQDVSTAVAWYQQKPGKAPKLLIYSASFLYSGVPSRFSGSGSGTDFTLTISSLQPEDFATYYCQQGSGSPFTFGQGTKVEIKRTVAAPSVFIFPPSDEQLKSGTASVVCLLNNFYPREAKVQWKVDNALQSGNSQESVTEQDSKDSTYSLSSTLTLSKADYEKHKVYACEVTHQGLSSPVTKSFNRGEC

SEQ ID NO: 81 - protein, 9 aa, Artificial
  G6-5 CDR3 light chain
QQGAGSPFT

SEQ ID NO: 82 - protein, 214 aa, Artificial
  G6-5 Fab light chain
DIQMTQSPSSLSASVGDRVTITCRASQDVSTAVAWYQQKPGKAPKLLIYSASFLYSGVPSRFSGSGSGTDFTLTISSLQPEDFATYYCQQGAGSPFTFGQGTKVEIKRTVAAPSVFIFPPSDEQLKSGTASVVCLLNNFYPREAKVQWKVDNALQSGNSQESVTEQDSKDSTYSLSSTLTLSKADYEKHKVYACEVTHQGLSSPVTKSFNRGEC

SEQ ID NO: 83 - protein, 9 aa, Artificial
  G6-15 CDR3 light chain
QQGVNSPLT

SEQ ID NO: 84 - protein, 214 aa, Artificial
  G6-15 Fab light chain
DIQMTQSPSSLSASVGDRVTITCRASQDVSTAVAWYQQKPGKAPKLLIYSASFLYSGVPSRFSGSGSGTDFTLTISSLQPEDFATYYCQQGVNSPLTFGQGTKVEIKRTVAAPSVFIFPPSDEQLKSGTASVVCLLNNFYPREAKVQWKVDNALQSGNSQESVTEQDSKDSTYSLSSTLTLSKADYEKHKVYACEVTHQGLSSPVTKSFNRGEC

SEQ ID NO: 85 - protein, 11 aa, Artificial
  B20 CDR-L1
RASQDVSTAVA

SEQ ID NO: 86 - protein, 7 aa, Artificial
  B20 CDR-L2
SASFLYS

SEQ ID NO: 87 - protein, 9 aa, Artificial
  B20 CDR-L3
QQSYTTPPT

SEQ ID NO: 88 - protein, 214 aa, Artificial; identical to SEQ ID NO: 28
  B20 LC

SEQ ID NO: 89 - protein, 11 aa, Artificial
  B20-50 CDR-L1
RASQDVSTAVA

SEQ ID NO: 90 - protein, 7 aa, Artificial
  B20-50 CDR-L2
SASFLYS

SEQ ID NO: 91 - protein, 9 aa, Artificial
  B20-50 CDR-L3
QQSYGAPLT

SEQ ID NO: 92 - protein, 214 aa, Artificial
  B20-50 LC
DIQMTQSPSSLSASVGDRVTITCRASQDVSTAVAWYQQKPGKAPKLLIYSASFLYSGVPSRFSGSGSGTDFTLTISSLQPEDFATYYCQQSYGAPLTFGQGTKVEIKRTVAAPSVFIFPPSDEQLKSGTASVVCLLNNFYPREAKVQWKVDNALQSGNSQESVTEQDSKDSTYSLSSTLTLSKADYEKHKVYACEVTHQGLSSPVTKSFNRGEC

SEQ ID NO: 93 - protein, 11 aa, Artificial
  B20-59 CDR-L1
RASQDVSTAVA

SEQ ID NO: 94 - protein, 7 aa, Artificial
  B20-59 CDR-L2
SASFLYS

SEQ ID NO: 95 - protein, 9 aa, Artificial
  B20-59 CDR-L3
QQSYSSPLT

SEQ ID NO: 96 - protein, 214 aa, Artificial
  B20-59 LC
DIQMTQSPSSLSASVGDRVTITCRASQDVSTAVAWYQQKPGKAPKLLIYSASFLYSGVPSRFSGSGSGTDFTLTISSLQPEDFATYYCQQSYSSPLTFGQGTKVEIKRTVAAPSVFIFPPSDEQLKSGTASVVCLLNNFYPREAKVQWKVDNALQSGNSQESVTEQDSKDSTYSLSSTLTLSKADYEKHKVYACEVTHQGLSSPVTKSFNRGEC

SEQ ID NO: 97 - protein, 11 aa, Artificial
  B20-73 CDR-L1
RASQGVRTSLA

SEQ ID NO: 98 - protein, 7 aa, Artificial
  B20-73 CDR-L2
GASTLAS

SEQ ID NO: 99 - protein, 9 aa, Artificial
  B20-73 CDR-L3
QQSYASPLT

SEQ ID NO: 100 - protein, 214 aa, Artificial
  B20-73 LC
DIQMTQSPSSLSASVGDRVTITCRASQGVRTSLAWYQQKPGKAPKLLIYGASTLASGVPSRFSGSGSGTDFTLTISSLQPEDFATYYCQQSYASPLTFGQGTKVEIKRTVAAPSVFIFPPSDEQLKSGTASVVCLLNNFYPREAKVQWKVDNALQSGNSQESVTEQDSKDSTYSLSSTLTLSKADYEKHKVYACEVTHQGLSSPVTKSFNRGEC

SEQ ID NO: 101 - protein, 11 aa, Artificial
  B20-3 CDR-L1
RASQVIGRSLA

SEQ ID NO: 102 - protein, 7 aa, Artificial
  B20-3 CDR-L2
SASFLYS

SEQ ID NO: 103 - protein, 9 aa, Artificial
  B20-3 CDR-L3
QQSYASPLT

SEQ ID NO: 104 - protein, 214 aa, Artificial
  B20-3 LC
DIQMTQSPSSLSASVGDRVTITCRASQVIGRSLAWYQQKPGKAPKLLIYSASFLYSGVPSRFSGSGSGTDFTLTISSLQPEDFATYYCQQSYASPLTFGQGTKVEIKRTVAAPSVFIFPPSDEQLKSGTASVVCLLNNFYPREAKVQWKVDNALQSGNSQESVTEQDSKDSTYSLSSTLTLSKADYEKHKVYACEVTHQGLSSPVTKSFNRGEC

SEQ ID NO: 105 - protein, 11 aa, Artificial
  B20-8 CDR-L1
RASQDVSTAVA

SEQ ID NO: 106 - protein, 7 aa, Artificial
  B20-8 CDR-L2
SASFLYS

SEQ ID NO: 107 - protein, 9 aa, Artificial
  B20-8 CDR-L3
QQSYGSPLT

SEQ ID NO: 108 - protein, 214 aa, Artificial
  B20-8 LC
DIQMTQSPSSLSASVGDRVTITCRASQDVSTAVAWYQQKPGKAPKLLIYSASFLYSGVPSRFSGSGSGTDFTLTISSLQPEDFATYYCQQSYGSPLTFGQGTKVEIKRTVAAPSVFIFPPSDEQLKSGTASVVCLLNNFYPREAKVQWKVDNALQSGNSQESVTEQDSKDSTYSLSSTLTLSKADYEKHKVYACEVTHQGLSSPVTKSFNRGEC

SEQ ID NO: 109 - protein, 11 aa, Artificial
  B20-2 CDR-L1
RASQNVRSSLA

SEQ ID NO: 110 - protein, 7 aa, Artificial
  B20-2 CDR-L2
SASNLES

SEQ ID NO: 111 - protein, 9 aa, Artificial
  B20-2 CDR-L3
QQSYAAPLT

SEQ ID NO: 112 - protein, 214 aa, Artificial
  B20-2 LC
DIQMTQSPSSLSASVGDRVTITCRASQNVRSSLAWYQQKPGKAPKLLIYSASNLESGVPSRFSGSGSGTDFTLTISSLQPEDFATYYCQQSYAAPLTFGQGTKVEIKRTVAAPSVFIFPPSDEQLKSGTASVVCLLNNFYPREAKVQWKVDNALQSGNSQESVTEQDSKDSTYSLSSTLTLSKADYEKHKVYACEVTHQGLSSPVTKSFNRGEC

SEQ ID NO: 113 - protein, 11 aa, Artificial
  B20-4a CDR-L1
RASQVIGTSLA

SEQ ID NO: 114 - protein, 7 aa, Artificial
  B20-4a CDR-L2
SASNLAS

SEQ ID NO: 115 - protein, 9 aa, Artificial
  B20-4a CDR-L3
QQSYGSPLT

SEQ ID NO: 116 - protein, 214 aa, Artificial
  B20-4a LC
DIQMTQSPSSLSASVGDRVTITCRASQVIGTSLAWYQQKPGKAPKLLIYSASNLASGVPSRFSGSGSGTDFTLTISSLQPEDFATYYCQQSYGSPLTFGQGTKVEIKRTVAAPSVFIFPPSDEQLKSGTASVVCLLNNFYPREAKVQWKVDNALQSGNSQESVTEQDSKDSTYSLSSTLTLSKADYEKHKVYACEVTHQGLSSPVTKSFNRGEC

SEQ ID NO: 117 - protein, 11 aa, Artificial
  B20-4 CDR-L1
RASQVIRRSLA

SEQ ID NO: 118 - protein, 7 aa, Artificial
  B20-4 CDR-L2
AASNLAS

SEQ ID NO: 119 - protein, 9 aa, Artificial
  B20-4 CDR-L3
QQSNTSPLT

SEQ ID NO: 120 - protein, 214 aa, Artificial; identical to SEQ ID NO: 39
  B20-4 LC

SEQ ID NO: 121 - protein, 11 aa, Artificial
  B20-6 CDR-L1
RASQDVSTAVA

SEQ ID NO: 122 - protein, 7 aa, Artificial
  B20-6 CDR-L2
SASTLAS

SEQ ID NO: 123 - protein, 9 aa, Artificial
  B20-6 CDR-L3
QQSTTSPLT

SEQ ID NO: 124 - protein, 214 aa, Artificial
  B20-6 LC
DIQMTQSPSSLSASVGDRVTITCRASQDVSTAVAWYQQKPGKAPKLLIYSASTLASGVPSRFSGSGSGTDFTLTISSLQPEDFATYYCQQSTTSPLTFGQGTKVEIKRTVAAPSVFIFPPSDEQLKSGTASVVCLLNNFYPREAKVQWKVDNALQSGNSQESVTEQDSKDSTYSLSSTLTLSKADYEKHKVYACEVTHQGLSSPVTKSFNRGEC

SEQ ID NO: 125 - protein, 11 aa, Artificial
  B20-5 CDR-L1
RASQDVSTAVA

SEQ ID NO: 126 - protein, 7 aa, Artificial
  B20-5 CDR-L2
SASFLYS

SEQ ID NO: 127 - protein, 9 aa, Artificial
  B20-5 CDR-L3
QQSTNSPLT

SEQ ID NO: 128 - protein, 214 aa, Artificial
  B20-5 LC
DIQMTQSPSSLSASVGDRVTITCRASQDVSTAVAWYQQKPGKAPKLLIYSASFLYSGVPSRFSGSGSGTDFTLTISSLQPEDFATYYCQQSTNSPLTFGQGTKVEIKRTVAAPSVFIFPPSDEQLKSGTASVVCLLNNFYPREAKVQWKVDNALQSGNSQESVTEQDSKDSTYSLSSTLTLSKADYEKHKVYACEVTHQGLSSPVTKSFNRGEC

SEQ ID NO: 129 - protein, 11 aa, Artificial
  B20-1a CDR-L1
RASQGVKNSLA

SEQ ID NO: 130 - protein, 7 aa, Artificial
  B20-1a CDR-L2
SASTLES

SEQ ID NO: 131 - protein, 9 aa, Artificial
  B20-1a CDR-L3
QQSNASPLT

SEQ ID NO: 132 - protein, 214 aa, Artificial
  B20-1a LC
DIQMTQSPSSLSASVGDRVTITCRASQGVKNSLAWYQQKPGKAPKLLIYSASTLESGVPSRFSGSGSGTDFTLTISSLQPEDFATYYCQQSNASPLTFGQGTKVEIKRTVAAPSVFIFPPSDEQLKSGTASVVCLLNNFYPREAKVQWKVDNALQSGNSQESVTEQDSKDSTYSLSSTLTLSKADYEKHKVYACEVTHQGLSSPVTKSFNRGEC

SEQ ID NO: 133 - protein, 11 aa, Artificial
  B20-1 CDR-L1
RASQDVRTSLA

SEQ ID NO: 134 - protein, 7 aa, Artificial
  B20-1 CDR-L2
GASTLAS

SEQ ID NO: 135 - protein, 9 aa, Artificial
  B20-1 CDR-L3
QQSNSSPLT

SEQ ID NO: 136 - protein, 214 aa, Artificial
  B20-1 LC
DIQMTQSPSSLSASVGDRVTITCRASQDVRTSLAWYQQKPGKAPKLLIYGASTLASGVPSRFSGSGSGTDFTLTISSLQPEDFATYYCQQSNSSPLTFGQGTKVEIKRTVAAPSVFIFPPSDEQLKSGTASVVCLLNNFYPREAKVQWKVDNALQSGNSQESVTEQDSKDSTYSLSSTLTLSKADYEKHKVYACEVTHQGLSSPVTKSFNRGEC

SEQ ID NO: 137 - protein, 11 aa, Artificial
  B20-13 CDR-L1
RASQNVRNFLA

SEQ ID NO: 138 - protein, 7 aa, Artificial
  B20-13 CDR-L2
SASTLAS

SEQ ID NO: 139 - protein, 9 aa, Artificial
  B20-13 CDR-L3
QQHTNSPLT

SEQ ID NO: 140 - protein, 214 aa, Artificial
  B20-13 LC
DIQMTQSPSSLSASVGDRVTITCRASQNVRNFLAWYQQKPGKAPKLLIYSASTLASGVPSRFSGSGSGTDFTLTISSLQPEDFATYYCQQHTNSPLTFGQGTKVEIKRTVAAPSVFIFPPSDEQLKSGTASVVCLLNNFYPREAKVQWKVDNALQSGNSQESVTEQDSKDSTYSLSSTLTLSKADYEKHKVYACEVTHQGLSSPVTKSFNRGEC

SEQ ID NO: 141 - protein, 11 aa, Artificial
  G623 CDR-L1
RASQDVSTAVA

SEQ ID NO: 142 - protein, 7 aa, Artificial
  G623 CDR-L2
SASFLYS

SEQ ID NO: 143 - protein, 9 aa, Artificial
  G623 CDR-L3
KQGYANPWT

SEQ ID NO: 144 - protein, 214 aa, Artificial; identical to SEQ ID NO: 30
  G623 LC

SEQ ID NO: 145 - protein, 11 aa, Artificial
  G623_57 CDR-L1
RASEAVSAAVA

SEQ ID NO: 146 - protein, 7 aa, Artificial
  G623_57 CDR-L2
SASFLSS

SEQ ID NO: 147 - protein, 9 aa, Artificial
  G623_57 CDR-L3
AQGYAAPST

SEQ ID NO: 148 - protein, 214 aa, Artificial
  G623_57 LC
DIQMTQSPSSLSASVGDRVTITCRASEAVSAAVAWYQQKPGKAPKLLIYSASFLSSGVPSRFSGSGSGTDFTLTISSLQPEDFATYYCAQGYAAPSTFGQGTKVEIKRTVAAPSVFIFPPSDEQLKSGTASVVCLLNNFYPREAKVQWKVDNALQSGNSQESVTEQDSKDSTYSLSSTLTLSKADYEKHKVYACEVTHQGLSSPVTKSFNRGEC

SEQ ID NO: 149 - protein, 11 aa, Artificial
  G623_13 CDR-L1
RASAAVAAAVA

SEQ ID NO: 150 - protein, 7 aa, Artificial
  G623_13 CDR-L2
SASFLAS

SEQ ID NO: 151 - protein, 9 aa, Artificial
  G623_13 CDR-L3
AQGYGAPST

SEQ ID NO: 152 - protein, 214 aa, Artificial
  G623_13 LC
DIQMTQSPSSLSASVGDRVTITCRASAAVAAAVAWYQQKPGKAPKLLIYSASFLASGVPSRFSGSGSGTDFTLTISSLQPEDFATYYCAQGYGAPSTFGQGTKVEIKRTVAAPSVFIFPPSDEQLKSGTASVVCLLNNFYPREAKVQWKVDNALQSGNSQESVTEQDSKDSTYSLSSTLTLSKADYEKHKVYACEVTHQGLSSPVTKSFNRGEC

SEQ ID NO: 153 - protein, 11 aa, Artificial
  G623_87 CDR-L1
RASQEVATAVA

SEQ ID NO: 154 - protein, 7 aa, Artificial
  G623_87 CDR-L2
SASYLYS

SEQ ID NO: 155 - protein, 9 aa, Artificial
  G623_87 CDR-L3
KQGFSDPWT

SEQ ID NO: 156 - protein, 214 aa, Artificial
  G623_87 LC
DIQMTQSPSSLSASVGDRVTITCRASQEVATAVAWYQQKPGKAPKLLIYSASYLYSGVPSRFSGSGSGTDFTLTISSLQPEDFATYYCKQGFSDPWTFGQGTKVEIKRTVAAPSVFIFPPSDEQLKSGTASVVCLLNNFYPREAKVQWKVDNALQSGNSQESVTEQDSKDSTYSLSSTLTLSKADYEKHKVYACEVTHQGLSSPVTKSFNRGEC

SEQ ID NO: 157 - protein, 11 aa, Artificial
  G623_77 CDR-L1
RASEEVATAVA

SEQ ID NO: 158 - protein, 7 aa, Artificial
  G623_77 CDR-L2
AASFLYS

SEQ ID NO: 159 - protein, 9 aa, Artificial
  G623_77 CDR-L3
KQGYANPWT

SEQ ID NO: 160 - protein, 214 aa, Artificial
  G623_77 LC
DIQMTQSPSSLSASVGDRVTITCRASEEVATAVAWYQQKPGKAPKLLIYAASFLYSGVPSRFSGSGSGTDFTLTISSLQPEDFATYYCKQGYANPWTFGQGTKVEIKRTVAAPSVFIFPPSDEQLKSGTASVVCLLNNFYPREAKVQWKVDNALQSGNSQESVTEQDSKDSTYSLSSTLTLSKADYEKHKVYACEVTHQGLSSPVTKSFNRGEC

SEQ ID NO: 161 - protein, 11 aa, Artificial
  G623_20 CDR-L1
RASADVAAAVA

SEQ ID NO: 162 - protein, 7 aa, Artificial
  G623_20 CDR-L2
SASFLAS

SEQ ID NO: 163 - protein, 9 aa, Artificial
  G623_20 CDR-L3
AQGSGAPAT

SEQ ID NO: 164 - protein, 214 aa, Artificial
  G623_20 LC
DIQMTQSPSSLSASVGDRVTITCRASADVAAAVAWYQQKPGKAPKLLIYSASFLASGVPSRFSGSGSGTDFTLTISSLQPEDFATYYCAQGSGAPATFGQGTKVEIKRTVAAPSVFIFPPSDEQLKSGTASVVCLLNNFYPREAKVQWKVDNALQSGNSQESVTEQDSKDSTYSLSSTLTLSKADYEKHKVYACEVTHQGLSSPVTKSFNRGEC

SEQ ID NO: 165 - protein, 11 aa, Artificial
  G623_51 CDR-L1
RASADASTAVA

SEQ ID NO: 166 - protein, 7 aa, Artificial
  G623_51 CDR-L2
AASFLYS

SEQ ID NO: 167 - protein, 9 aa, Artificial
  G623_51 CDR-L3
AQGYANPAT

SEQ ID NO: 168 - protein, 214 aa, Artificial
  G623_51 LC
DIQMTQSPSSLSASVGDRVTITCRASADASTAVAWYQQKPGKAPKLLIYAASFLYSGVPSRFSGSGSGTDFTLTISSLQPEDFATYYCAQGYANPATFGQGTKVEIKRTVAAPSVFIFPPSDEQLKSGTASVVCLLNNFYPREAKVQWKVDNALQSGNSQESVTEQDSKDSTYSLSSTLTLSKADYEKHKVYACEVTHQGLSSPVTKSFNRGEC

SEQ ID NO: 169 - protein, 11 aa, Artificial
  G623_36 CDR-L1
RASEEISTAVA

SEQ ID NO: 170 - protein, 7 aa, Artificial
  G623_36 CDR-L2
SASYLYS

SEQ ID NO: 171 - protein, 9 aa, Artificial
  G623_36 CDR-L3
KQGPSDPWT

SEQ ID NO: 172 - protein, 214 aa, Artificial
  G623_36 LC
DIQMTQSPSSLSASVGDRVTITCRASEEISTAVAWYQQKPGKAPKLLIYSASYLYSGVPSRFSGSGSGTDFTLTISSLQPEDFATYYCKQGPSDPWTFGQGTKVEIKRTVAAPSVFIFPPSDEQLKSGTASVVCLLNNFYPREAKVQWKVDNALQSGNSQESVTEQDSKDSTYSLSSTLTLSKADYEKHKVYACEVTHQGLSSPVTKSFNRGEC

SEQ ID NO: 173 - protein, 11 aa, Artificial
  G623_80 CDR-L1
RASQEVASAVA

SEQ ID NO: 174 - protein, 7 aa, Artificial
  G623_80 CDR-L2
SASYLFS

SEQ ID NO: 175 - protein, 9 aa, Artificial
  G623_80 CDR-L3
KQAFSNPLT

SEQ ID NO: 176 - protein, 214 aa, Artificial
  G623_80 LC
DIQMTQSPSSLSASVGDRVTITCRASQEVASAVAWYQQKPGKAPKLLIYSASYLFSGVPSRFSGSGSGTDFTLTISSLQPEDFATYYCKQAFSNPLTFGQGTKVEIKRTVAAPSVFIFPPSDEQLKSGTASVVCLLNNFYPREAKVQWKVDNALQSGNSQESVTEQDSKDSTYSLSSTLTLSKADYEKHKVYACEVTHQGLSSPVTKSFNRGEC

SEQ ID NO: 177 - protein, 11 aa, Artificial
  G623_66 CDR-L1
RASPDVATGVA

SEQ ID NO: 178 - protein, 7 aa, Artificial
  G623_66 CDR-L2
SASFLSS

SEQ ID NO: 179 - protein, 9 aa, Artificial
  G623_66 CDR-L3
AQAYAAPAT

SEQ ID NO: 180 - protein, 214 aa, Artificial
  G623_66 LC
DIQMTQSPSSLSASVGDRVTITCRASPDVATGVAWYQQKPGKAPKLLIYSASFLSSGVPSRFSGSGSGTDFTLTISSLQPEDFATYYCAQAYAAPATFGQGTKVEIKRTVAAPSVFIFPPSDEQLKSGTASVVCLLNNFYPREAKVQWKVDNALQSGNSQESVTEQDSKDSTYSLSSTLTLSKADYEKHKVYACEVTHQGLSSPVTKSFNRGEC

SEQ ID NO: 181 - protein, 11 aa, Artificial
  G623_33 CDR-L1
RASPAVSAAVA

SEQ ID NO: 182 - protein, 7 aa, Artificial
  G623_33 CDR-L2
SASFLYS

SEQ ID NO: 183 - protein, 9 aa, Artificial
  G623_33 CDR-L3
AQGSAAPAT

SEQ ID NO: 184 - protein, 214 aa, Artificial
  G623_33 LC
DIQMTQSPSSLSASVGDRVTITCRASPAVSAAVAWYQQKPGKAPKLLIYSASFLYSGVPSRFSGSGSGTDFTLTISSLQPEDFATYYCAQGSAAPATFGQGTKVEIKRTVAAPSVFIFPPSDEQLKSGTASVVCLLNNFYPREAKVQWKVDNALQSGNSQESVTEQDSKDSTYSLSSTLTLSKADYEKHKVYACEVTHQGLSSPVTKSFNRGEC

SEQ ID NO: 185 - protein, 11 aa, Artificial
  G623_59 CDR-L1
RASPAVAAGVA

SEQ ID NO: 186 - protein, 7 aa, Artificial
  G623_59 CDR-L2
SASFLYS

SEQ ID NO: 187 - protein, 9 aa, Artificial
  G623_59 CDR-L3
AQAYAAPAT

SEQ ID NO: 188 - protein, 214 aa, Artificial
  G623_59 LC
DIQMTQSPSSLSASVGDRVTITCRASPAVAAGVAWYQQKPGKAPKLLIYSASFLYSGVPSRFSGSGSGTDFTLTISSLQPEDFATYYCAQAYAAPATFGQGTKVEIKRTVAAPSVFIFPPSDEQLKSGTASVVCLLNNFYPREAKVQWKVDNALQSGNSQESVTEQDSKDSTYSLSSTLTLSKADYEKHKVYACEVTHQGLSSPVTKSFNRGEC

SEQ ID NO: 189 - protein, 11 aa, Artificial
  G623_22 CDR-L1
RASPAVAAAVA

SEQ ID NO: 190 - protein, 7 aa, Artificial
  G623_22 CDR-L2
SASVLYS

SEQ ID NO: 191 - protein, 9 aa, Artificial
  G623_22 CDR-L3
AQAYAAPAT

SEQ ID NO: 192 - protein, 214 aa, Artificial
  G623_22 LC
DIQMTQSPSSLSASVGDRVTITCRASPAVAAAVAWYQQKPGKAPKLLIYSASVLYSGVPSRFSGSGSGTDFTLTISSLQPEDFATYYCAQAYAAPATFGQGTKVEIKRTVAAPSVFIFPPSDEQLKSGTASVVCLLNNFYPREAKVQWKVDNALQSGNSQESVTEQDSKDSTYSLSSTLTLSKADYEKHKVYACEVTHQGLSSPVTKSFNRGEC

SEQ ID NO: 193 - protein, 11 aa, Artificial
  G623_29 CDR-L1
RASQEVSTAVA

SEQ ID NO: 194 - protein, 7 aa, Artificial
  G623_29 CDR-L2
SASYLFS

SEQ ID NO: 195 - protein, 9 aa, Artificial
  G623_29 CDR-L3
KQGFSNPWT

SEQ ID NO: 196 - protein, 214 aa, Artificial
  G623_29 LC
DIQMTQSPSSLSASVGDRVTITCRASQEVSTAVAWYQQKPGKAPKLLIYSASYLFSGVPSRFSGSGSGTDFTLTISSLQPEDFATYYCKQGFSNPWTFGQGTKVEIKRTVAAPSVFIFPPSDEQLKSGTASVVCLLNNFYPREAKVQWKVDNALQSGNSQESVTEQDSKDSTYSLSSTLTLSKADYEKHKVYACEVTHQGLSSPVTKSFNRGEC

SEQ ID NO: 197 - protein, 11 aa, Artificial
  G623_49 CDR-L1
RASPDVATGVA

SEQ ID NO: 198 - protein, 7 aa, Artificial
  G623_49 CDR-L2
SASFLSS

SEQ ID NO: 199 - protein, 9 aa, Artificial
  G623_49 CDR-L3
AQAYAAPAT

SEQ ID NO: 200 - protein, 214 aa, Artificial; identical to SEQ ID NO: 180
  G623_49 LC

SEQ ID NO: 201 - protein, 12 aa, Artificial
  G623_58 CDR-L1
RASPAVASAAVA

SEQ ID NO: 202 - protein, 7 aa, Artificial
  G623_58 CDR-L2
AASFLAS

SEQ ID NO: 203 - protein, 9 aa, Artificial
  G623_58 CDR-L3
AQGSGAPAT

SEQ ID NO: 204 - protein, 214 aa, Artificial
  G623_58 LC
DIQMTQSPSSLSASVGDRVTITCRASQDVATAVAWYQQKPGKAPKLLIYAASFLASGVPSRFSGSGSGTDFTLTISSLQPEDFATYYCAQGSGAPATFGQGTKVEIKRTVAAPSVFIFPPSDEQLKSGTASVVCLLNNFYPREAKVQWKVDNALQSGNSQESVTEQDSKDSTYSLSSTLTLSKADYEKHKVYACEVTHQGLSSPVTKSFNRGEC

SEQ ID NO: 205 - protein, 11 aa, Artificial
  G623_37 CDR-L1
RASQDVATAVA

SEQ ID NO: 206 - protein, 7 aa, Artificial
  G623_37 CDR-L2
AASYLYS

SEQ ID NO: 207 - protein, 9 aa, Artificial
  G623_37 CDR-L3
EQAFSNPLT

SEQ ID NO: 208 - protein, 214 aa, Artificial
  G623_37 LC
DIQMTQSPSSLSASVGDRVTITCRASQDVATAVAWYQQKPGKAPKLLIYAASYLYSGVPSRFSGSGSGTDFTLTISSLQPEDFATYYCEQAFSNPLTFGQGTKVEIKRTVAAPSVFIFPPSDEQLKSGTASVVCLLNNFYPREAKVQWKVDNALQSGNSQESVTEQDSKDSTYSLSSTLTLSKADYEKHKVYACEVTHQGLSSPVTKSFNRGEC

SEQ ID NO: 209 - protein, 11 aa, Artificial
  G623_23 CDR-L1
RASQAASAAVA

SEQ ID NO: 210 - protein, 7 aa, Artificial
  G623_23 CDR-L2
AASFLSS

SEQ ID NO: 211 - protein, 9 aa, Artificial
  G623_23 CDR-L3
AQGAAAPST

SEQ ID NO: 212 - protein, 214 aa, Artificial
  G623_23 LC
DIQMTQSPSSLSASVGDRVTITCRASQAASAAVAWYQQKPGKAPKLLIYAASFLSSGVPSRFSGSGSGTDFTLTISSLQPEDFATYYCAQGAAAPSTFGQGTKVEIKRTVAAPSVFIFPPSDEQLKSGTASVVCLLNNFYPREAKVQWKVDNALQSGNSQESVTEQDSKDSTYSLSSTLTLSKADYEKHKVYACEVTHQGLSSPVTKSFNRGEC

SEQ ID NO: 213 - protein, 11 aa, Artificial
  G623_89 CDR-L1
RASQDVATAVA

SEQ ID NO: 214 - protein, 7 aa, Artificial
  G623_89 CDR-L2
SASYLYS

SEQ ID NO: 215 - protein, 9 aa, Artificial
  G623_89 CDR-L3
QEGFSDPLT

SEQ ID NO: 216 - protein, 214 aa, Artificial
  G623_89 LC
DIQMTQSPSSLSASVGDRVTITCRASQDVATAVAWYQQKPGKAPKLLIYSASYLYSGVPSRFSGSGSGTDFTLTISSLQPEDFATYYCQEGFSDPLTFGQGTKVEIKRTVAAPSVFIFPPSDEQLKSGTASVVCLLNNFYPREAKVQWKVDNALQSGNSQESVTEQDSKDSTYSLSSTLTLSKADYEKHKVYACEVTHQGLSSPVTKSFNRGEC

SEQ ID NO: 217 - protein, 11 aa, Artificial
  G623_55 CDR-L1
RASPDVATGVA

SEQ ID NO: 218 - protein, 7 aa, Artificial
  G623_55 CDR-L2
SASFLYS

SEQ ID NO: 219 - protein, 9 aa, Artificial
  G623_55 CDR-L3
AQGAGAPAT

SEQ ID NO: 220 - protein, 214 aa, Artificial
  G623_55 LC
DIQMTQSPSSLSASVGDRVTITCRASPDVATGVAWYQQKPGKAPKLLIYSASFLYSGVPSRFSGSGSGTDFTLTISSLQPEDFATYYCAQGAGAPATFGQGTKVEIKRTVAAPSVFIFPPSDEQLKSGTASVVCLLNNFYPREAKVQWKVDNALQSGNSQESVTEQDSKDSTYSLSSTLTLSKADYEKHKVYACEVTHQGLSSPVTKSFNRGEC

SEQ ID NO: 221 - protein, 11 aa, Artificial
  G623_34 CDR-L1
RASQEIASAVA

SEQ ID NO: 222 - protein, 7 aa, Artificial
  G623_34 CDR-L2
SASFLYS

SEQ ID NO: 223 - protein, 9 aa, Artificial
  G623_34 CDR-L3
EQAFSNPLT

SEQ ID NO: 224 - protein, 214 aa, Artificial
  G623_34 LC
DIQMTQSPSSLSASVGDRVTITCRASQEIASAVAWYQQKPGKAPKLLIYSASFLYSGVPSRFSGSGSGTDFTLTISSLQPEDFATYYCEQAFSNPLTFGQGTKVEIKRTVAAPSVFIFPPSDEQLKSGTASVVCLLNNFYPREAKVQWKVDNALQSGNSQESVTEQDSKDSTYSLSSTLTLSKADYEKHKVYACEVTHQGLSSPVTKSFNRGEC

SEQ ID NO: 225 - protein, 11 aa, Artificial
  G623_31 CDR-L1
RASPDVATAVA

SEQ ID NO: 226 - protein, 7 aa, Artificial
  G623_31 CDR-L2
AASFLYS

SEQ ID NO: 227 - protein, 9 aa, Artificial
  G623_31 CDR-L3
AQGYAAPAT

SEQ ID NO: 228 - protein, 214 aa, Artificial
  G623_31 LC
DIQMTQSPSSLSASVGDRVTITCRASPDVATAVAWYQQKPGKAPKLLIYAASFLYSGVPSRFSGSGSGTDFTLTISSLQPEDFATYYCAQGYAAPATFGQGTKVEIKRTVAAPSVFIFPPSDEQLKSGTASVVCLLNNFYPREAKVQWKVDNALQSGNSQESVTEQDSKDSTYSLSSTLTLSKADYEKHKVYACEVTHQGLSSPVTKSFNRGEC

SEQ ID NO: 229 - protein, 11 aa, Artificial
  G623_62 CDR-L1
RASAAVAAAVA

SEQ ID NO: 230 - protein, 7 aa, Artificial
  G623_62 CDR-L2
AASFLSS

SEQ ID NO: 231 - protein, 9 aa, Artificial
  G623_62 CDR-L3
AQSSAAPPT

SEQ ID NO: 232 - protein, 214 aa, Artificial
  G623_62 LC
DIQMTQSPSSLSASVGDRVTITCRASAAVAAAVAWYQQKPGKAPKLLIYAASFLSSGVPSRFSGSGSGTDFTLTISSLQPEDFATYYCAQSSAAPPTFGQGTKVEIKRTVAAPSVFIFPPSDEQLKSGTASVVCLLNNFYPREAKVQWKVDNALQSGNSQESVTEQDSKDSTYSLSSTLTLSKADYEKHKVYACEVTHQGLSSPVTKSFNRGEC

SEQ ID NO: 233 - protein, 11 aa, Artificial
  G623_63 CDR-L1
RASPAASTAVA

SEQ ID NO: 234 - protein, 7 aa, Artificial
  G623_63 CDR-L2
AASFLYS

SEQ ID NO: 235 - protein, 9 aa, Artificial
  G623_63 CDR-L3
AQGYGTPST

SEQ ID NO: 236 - protein, 214 aa, Artificial
  G623_63 LC
DIQMTQSPSSLSASVGDRVTITCRASPAASTAVAWYQQKPGKAPKLLIYAASFLYSGVPSRFSGSGSGTDFTLTISSLQPEDFATYYCAQGYGTPSTFGQGTKVEIKRTVAAPSVFIFPPSDEQLKSGTASVVCLLNNFYPREAKVQWKVDNALQSGNSQESVTEQDSKDSTYSLSSTLTLSKADYEKHKVYACEVTHQGLSSPVTKSFNRGEC

SEQ ID NO: 237 - protein, 11 aa, Artificial
  G623_83 CDR-L1
RASQEISSAVA

SEQ ID NO: 238 - protein, 7 aa, Artificial
  G623_83 CDR-L2
SASFLYS

SEQ ID NO: 239 - protein, 9 aa, Artificial
  G623_83 CDR-L3
QEAYADPLT

SEQ ID NO: 240 - protein, 214 aa, Artificial
  G623_83 LC
DIQMTQSPSSLSASVGDRVTITCRASQEISSAVAWYQQKPGKAPKLLIYSASFLYSGVPSRFSGSGSGTDFTLTISSLQPEDFATYYCQEAYADPLTFGQGTKVEIKRTVAAPSVFIFPPSDEQLKSGTASVVCLLNNFYPREAKVQWKVDNALQSGNSQESVTEQDSKDSTYSLSSTLTLSKADYEKHKVYACEVTHQGLSSPVTKSFNRGEC

SEQ ID NO: 241 - protein, 11 aa, Artificial
  G623_64 CDR-L1
RASQDVSAAVA

SEQ ID NO: 242 - protein, 7 aa, Artificial
  G623_64 CDR-L2
SASFLAS

SEQ ID NO: 243 - protein, 9 aa, Artificial
  G623_64 CDR-L3
AQAAAAPST

SEQ ID NO: 244 - protein, 214 aa, Artificial
  G623_64 LC
DIQMTQSPSSLSASVGDRVTITCRASQDVSAAVAWYQQKPGKAPKLLIYSASFLASGVPSRFSGSGSGTDFTLTISSLQPEDFATYYCAQAAAAPSTFGQGTKVEIKRTVAAPSVFIFPPSDEQLKSGTASVVCLLNNFYPREAKVQWKVDNALQSGNSQESVTEQDSKDSTYSLSSTLTLSKADYEKHKVYACEVTHQGLSSPVTKSFNRGEC

SEQ ID NO: 245 - protein, 11 aa, Artificial
  G623_75 CDR-L1
RASQEVASAVA

SEQ ID NO: 246 - protein, 7 aa, Artificial
  G623_75 CDR-L2
AASYLFS

SEQ ID NO: 247 - protein, 9 aa, Artificial
  G623_75 CDR-L3
EQAFSNPLT

SEQ ID NO: 248 - protein, 214 aa, Artificial
  G623_75 LC
DIQMTQSPSSLSASVGDRVTITCRASQEVASAVAWYQQKPGKAPKLLIYAASYLFSGVPSRFSGSGSGTDFTLTISSLQPEDFATYYCEQAFSNPLTFGQGTKVEIKRTVAAPSVFIFPPSDEQLKSGTASVVCLLNNFYPREAKVQWKVDNALQSGNSQESVTEQDSKDSTYSLSSTLTLSKADYEKHKVYACEVTHQGLSSPVTKSFNRGEC

SEQ ID NO: 249 - protein, 11 aa, Artificial
  G623_27 CDR-L1
RASQEIASAVA

SEQ ID NO: 250 - protein, 7 aa, Artificial
  G623_27 CDR-L2
SASYLYS

SEQ ID NO: 251 - protein, 9 aa, Artificial
  G623_27 CDR-L3
QKAFSDPLT

SEQ ID NO: 252 - protein, 214 aa, Artificial
  G623_27 LC
DIQMTQSPSSLSASVGDRVTITCRASQEIASAVAWYQQKPGKAPKLLIYSASYLYSGVPSRFSGSGSGTDFTLTISSLQPEDFATYYCQKAFSDPLTFGQGTKVEIKRTVAAPSVFIFPPSDEQLKSGTASVVCLLNNFYPREAKVQWKVDNALQSGNSQESVTEQDSKDSTYSLSSTLTLSKADYEKHKVYACEVTHQGLSSPVTKSFNRGEC

SEQ ID NO: 253 - protein, 11 aa, Artificial
  G623_93 CDR-L1
RASQEVASAVA

SEQ ID NO: 254 - protein, 7 aa, Artificial
  G623_93 CDR-L2
SASYLFS

SEQ ID NO: 255 - protein, 9 aa, Artificial
  G623_93 CDR-L3
EQAFANPWT

SEQ ID NO: 256 - protein, 214 aa, Artificial
  G623_93 LC
DIQMTQSPSSLSASVGDRVTITCRASQEVASAVAWYQQKPGKAPKLLIYSASYLFSGVPSRFSGSGSGTDFTLTISSLQPEDFATYYCEQAFANPWTFGQGTKVEIKRTVAAPSVFIFPPSDEQLKSGTASVVCLLNNFYPREAKVQWKVDNALQSGNSQESVTEQDSKDSTYSLSSTLTLSKADYEKHKVYACEVTHQGLSSPVTKSFNRGEC

SEQ ID NO: 257 - protein, 11 aa, Artificial
  G623_53 CDR-L1
RASEAVSAAVA

SEQ ID NO: 258 - protein, 7 aa, Artificial
  G623_53 CDR-L2
AASFLSS

SEQ ID NO: 259 - protein, 9 aa, Artificial
  G623_53 CDR-L3
EQGAGAPGT

SEQ ID NO: 260 - protein, 214 aa, Artificial
  G623_53 LC
DIQMTQSPSSLSASVGDRVTITCRASEAVSAAVAWYQQKPGKAPKLLIYAASFLSSGVPSRFSGSGSGTDFTLTISSLQPEDFATYYCEQGAGAPGTFGQGTKVEIKRTVAAPSVFIFPPSDEQLKSGTASVVCLLNNFYPREAKVQWKVDNALQSGNSQESVTEQDSKDSTYSLSSTLTLSKADYEKHKVYACEVTHQGLSSPVTKSFNRGEC

SEQ ID NO: 261 - protein, 5 aa, Artificial
  G623 CDR-H1
DYWIH

SEQ ID NO: 262 - protein, 17 aa, Artificial
  G623 CDR-H2
GITPAGGYTYYADSVKG

SEQ ID NO: 263 - protein, 11 aa, Artificial
  G623 CDR-H3
FVFFLPYAMDY

SEQ ID NO: 264 - protein, 227 aa, Artificial; identical to SEQ ID NO: 31
  G623 HC

SEQ ID NO: 265 - protein, 5 aa, Artificial
  G623_15 CDR-H1
EYWIH

SEQ ID NO: 266 - protein, 17 aa, Artificial
  G623_15 CDR-H2
GITPAGGYSYYADSVKG

SEQ ID NO: 267 - protein, 11 aa, Artificial
  G623_15 CDR-H3
FVFFLPYAMDY

SEQ ID NO: 268 - protein, 227 aa, Artificial
  G623_15 HC
EVQLVESGGGLVQPGGSLRLSCAASGFTISEYWIHWVRQAPGKGLEWVAGITPAGGYSYYADSVKGRFTISADTSKNTAYLQMNSLRAEDTAVYYCARFVFFLPYAMDYWGQGTLVTVSSASTKGPSVFPLAPSSKSTSGGTAALGCLVKDYFPEPVTVSWNSGALTSGVHTFPAVLQSSGLYSLSSVVTVPSSSLGTQTYICNVNHKPSNTKVDKKVEPKSCDKTH

SEQ ID NO: 269 - protein, 5 aa, Artificial
  G623_69 CDR-H1
EYWIH

SEQ ID NO: 270 - protein, 17 aa, Artificial
  G623_69 CDR-H2
GVTPAGGFSYYADSVKG

SEQ ID NO: 271 - protein, 11 aa, Artificial
  G623_69 CDR-H3
YVFFLPYAMDY

SEQ ID NO: 272 - protein, 227 aa, Artificial
  G623_69 HC
EVQLVESGGGLVQPGGSLRLSCAASGFTIAEYWIHWVRQAPGKGLEWVAGVTPAGGFSYYADSVKGRFTISADTSKNTAYLQMNSLRAEDTAVYYCARYVFFLPYAMDYWGQGTLVTVSSASTKGPSVFPLAPSSKSTSGGTAALGCLVKDYFPEPVTVSWNSGALTSGVHTFPAVLQSSGLYSLSSVVTVPSSSLGTQTYICNVNHKPSNTKVDKKVEPKSCDKTH

SEQ ID NO: 273 - protein, 10 aa, Artificial
  YADS_1 HVL-H1
GFDISYYDIH

SEQ ID NO: 274 - protein, 17 aa, Artificial
  YADS_1 CDR-H2
SIAPYAGATYYADSVKG

SEQ ID NO: 275 - protein, 11 aa, Artificial
  YADS_1 CDR-H3
AADYAYDAMDY

SEQ ID NO: 276 - protein, 250 aa, Artificial
  YADS_1 HC
MKKNIAFLLASMFVFSIATNAYAEVQLVESGGGLVQPGGSLRLSCAASGFDISYYDIHWVRQAPGKGLEWVASIAPYAGATYYADSVKGRFTISADTSKNTAYLQMNSLRAEDTAVYYCSRAADYAYDAMDYWGQGTLVTVSSASTKGPSVFPLAPSSKSTSGGTAALGCLVKDYFPEPVTVSWNSGALTSGVHTFPAVLQSSGLYSLSSVVTVPSSSLGTQTYICNVNHKPSNTKVDKKVEPKSCDKTH

SEQ ID NO: 277 - protein, 10 aa, Artificial
  YADS_2 CDR-H1
GFNITYYSIH

SEQ ID NO: 278 - protein, 17 aa, Artificial
  YADS_2 CDR-H2
TISPTYGSTYYADSVKG

SEQ ID NO: 279 - protein, 11 aa, Artificial
  YADS_2 CDR-H3
SNNYSYYAMDY

SEQ ID NO: 280 - protein, 250 aa, Artificial
  YADS_2 HC
MKKNIAFLLASMFVFSIATNAYAEVQLVESGGGLVQPGGSLRLSCAASGFNITYYSIHWVRQAPGKGLEWVATISPTYGSTYYADSVKGRFTISADTSKNTAYLQMNSLRAEDTAVYYCSRSNNYSYYAMDYWGQGTLVTVSSASTKGPSVFPLAPSSKSTSGGTAALGCLVKDYFPEPVTVSWNSGALTSGVHTFPAVLQSSGLYSLSSVVTVPSSSLGTQTYICNVNHKPSNTKVDKKVEPKSCDKTH

SEQ ID NO: 281 - protein, 10 aa, Artificial
  YADS_3 CDR-H1
GFSISDYDIH

SEQ ID NO: 282 - protein, 17 aa, Artificial
  YADS_3 CDR-H2
AIAPYSGYTYYADSVKG

SEQ ID NO: 283 - protein, 11 aa, Artificial
  YADS_3 CDR-H3
SSYAYYSAMDY

SEQ ID NO: 284 - protein, 250 aa, Artificial
  YADS_3 HC
MKKNIAFLLASMFVFSIATNAYAEVQLVESGGGLVQPGGSLRLSCAASGFSISDYDIHWVRQAPGKGLEWVAAIAPYSGYTYYADSVKGRFTISADTSKNTAYLQMNSLRAEDTAVYYCSRSSYAYYSAMDYWGQGTLVTVSSASTKGPSVFPLAPSSKSTSGGTAALGCLVKDYFPEPVTVSWNSGALTSGVHTFPAVLQSSGLYSLSSVVTVPSSSLGTQTYICNVNHKPSNTKVDKKVEPKSCDKTH

SEQ ID NO: 285 - protein, 10 aa, Artificial
  YADS_4 CDR-H1
GFNIYYYSIH

SEQ ID NO: 286 - protein, 17 aa, Artificial
  YADS_4 CDR-H2
TISPYYGTTYYADSVKG

SEQ ID NO: 287 - protein, 11 aa, Artificial
  YADS_4 CDR-H3
STNTNYYAMDY

SEQ ID NO: 288 - protein, 250 aa, Artificial
  YADS_4 HC
MKKNIAFLLASMFVFSIATNAYAEVQLVESGGGLVQPGGSLRLSCAASGFNIYYYSIHWVRQAPGKGLEWVATISPYYGTTYYADSVKGRFTISADTSKNTAYLQMNSLRAEDTAVYYCSRSTNTNYYAMDYWGQGTLVTVSSASTKGPSVFPLAPSSKSTSGGTAALGCLVKDYFPEPVTVSWNSGALTSGVHTFPAVLQSSGLYSLSSVVTVPSSSLGTQTYICNVNHKPSNTKVDKKVEPKSCDKTH

SEQ ID NO: 289 - protein, 10 aa, Artificial
  YADS_5 CDR-H1
GFAISDYDIH

SEQ ID NO: 290 - protein, 17 aa, Artificial
  YADS_5 CDR-H2
AIAPYYGSTSYADSVKG

SEQ ID NO: 291 - protein, 11 aa, Artificial
  YADS_5 CDR-H3
SSYAYYAAMDY

SEQ ID NO: 292 - protein, 250 aa, Artificial
  YADS_5 HC
MKKNIAFLLASMFVFSIATNAYAEVQLVESGGGLVQPGGSLRLSCAASGFAISDYDIHWVRQAPGKGLEWVAAIAPYYGSTSYADSVKGRFTISADTSKNTAYLQMNSLRAEDTAVYYCSRSSYAYYAAMDYWGQGTLVTVSSASTKGPSVFPLAPSSKSTSGGTAALGCLVKDYFPEPVTVSWNSGALTSGVHTFPAVLQSSGLYSLSSVVTVPSSSLGTQTYICNVNHKPSNTKVDKKVEPKSCDKTH

SEQ ID NO: 293 - protein, 10 aa, Artificial
  YADS_6 CDR-H1
GFSIYDYDIH

SEQ ID NO: 294 - protein, 17 aa, Artificial
  YADS_6 CDR-H2
SIYPAYGSTAYADSVKG

SEQ ID NO: 295 - protein, 11 aa, Artificial
  YADS_6 CDR-H3
GAAYAYDAMDY

SEQ ID NO: 296 - protein, 250 aa, Artificial
  YADS_6 HC
MKKNIAFLLASMFVFSIATNAYAEVQLVESGGGLVQPGGSLRLSCAASGFSIYDYDIHWVRQAPGKGLEWVASIYPAYGSTAYADSVKGRFTISADTSKNTAYLQMNSLRAEDTAVYYCSRGAAYAYDAMDYWGQGTLVTVSSASTKGPSVFPLAPSSKSTSGGTAALGCLVKDYFPEPVTVSWNSGALTSGVHTFPAVLQSSGLYSLSSVVTVPSSSLGTQTYICNVNHKPSNTKVDKKVEPKSCDKTH

SEQ ID NO: 297 - protein, 10 aa, Artificial
  YADS_7 CDR-H1
GFSIDYYAIH

SEQ ID NO: 298 - protein, 17 aa, Artificial
  YADS_7 CDR-H2
SIAPYAGYTYYADSVKG

SEQ ID NO: 299 - protein, 11 aa, Artificial
  YADS_7 CDR-H3
AAAYYYDAMDY

SEQ ID NO: 300 - protein, 250 aa, Artificial
  YADS_7 HC
MKKNIAFLLASMFVFSIATNAYAEVQLVESGGGLVQPGGSLRLSCAASGFSIDYYAIHWVRQAPGKGLEWVASIAPYAGYTYYADSVKGRFTISADTSKNTAYLQMNSLRAEDTAVYYCSRAAAYYYDAMDYWGQGTLVTVSSASTKGPSVFPLAPSSKSTSGGTAALGCLVKDYFPEPVTVSWNSGALTSGVHTFPAVLQSSGLYSLSSVVTVPSSSLGTQTYICNVNHKPSNTKVDKKVEPKSCDKTH

SEQ ID NO: 301 - protein, 10 aa, Artificial
  YADS_8 CDR-H1
GFSIAYYDIH

SEQ ID NO: 302 - protein, 17 aa, Artificial
  YADS_8 CDR-H2
SIAPYAGATDYADSVKG

SEQ ID NO: 303 - protein, 11 aa, Artificial
  YADS_8 CDR-H3
SSYAYASAMDY

SEQ ID NO: 304 - protein, 250 aa, Artificial
  YADS_8 HC
MKKNIAFLLASMFVFSIATNAYAEVQLVESGGGLVQPGGSLRLSCAASGFSIAYYDIHWVRQAPGKGLEWVASIAPYAGATDYADSVKGRFTISADTSKNTAYLQMNSLRAEDTAVYYCSRSSYAYASAMDYWGQGTLVTVSSASTKGPSVFPLAPSSKSTSGGTAALGCLVKDYFPEPVTVSWNSGALTSGVHTFPAVLQSSGLYSLSSVVTVPSSSLGTQTYICNVNHKPSNTKVDKKVEPKSCDKTH

SEQ ID NO: 305 - protein, 10 aa, Artificial
  YADS_9 CDR-H1
GFDIYDYAIH

SEQ ID NO: 306 - protein, 17 aa, Artificial
  YADS_9 CDR-H2
SIAPYAGSTYYADSVKG

SEQ ID NO: 307 - protein, 11 aa, Artificial
  YADS_9 CDR-H3
DSYAYYAAMDY

SEQ ID NO: 308 - protein, 250 aa, Artificial
  YADS_9 HC
MKKNIAFLLASMFVFSIATNAYAEVQLVESGGGLVQPGGSLRLSCAASGFDIYDYAIHWVRQAPGKGLEWVASIAPYAGSTYYADSVKGRFTISADTSKNTAYLQMNSLRAEDTAVYYCSRDSYAYYAAMDYWGQGTLVTVSSASTKGPSVFPLAPSSKSTSGGTAALGCLVKDYFPEPVTVSWNSGALTSGVHTFPAVLQSSGLYSLSSVVTVPSSSLGTQTYICNVNHKPSNTKVDKKVEPKSCDKTH

SEQ ID NO: 309 - protein, 10 aa, Artificial
  YADS_10 CDR-H1
GFDISASDIH

SEQ ID NO: 310 - protein, 17 aa, Artificial
  YADS_10CDR-H2
SISPYAGYTAYADSVKG

SEQ ID NO: 311 - protein, 11 aa, Artificial
  YADS_10 CDR-H3
SAYYAASAMDY

SEQ ID NO: 312 - protein, 250 aa, Artificial
  YADS_10 HC
MKKNIAFLLASMFVFSIATNAYAEVQLVESGGGLVQPGGSLRLSCAASGFDISASDIHWVRQAPGKGLEWVASISPYAGYTAYADSVKGRFTISADTSKNTAYLQMNSLRAEDTAVYYCSRSAYYAASAMDYWGQGTLVTVSSASTKGPSVFPLAPSSKSTSGGTAALGCLVKDYFPEPVTVSWNSGALTSGVHTFPAVLQSSGLYSLSSVVTVPSSSLGTQTYICNVNHKPSNTKVDKKVEPKSCDKTH

SEQ ID NO: 313 - protein, 10 aa, Artificial
  YADS_11 CDR-H1
GFDIAYYDIH

SEQ ID NO: 314 - protein, 17 aa, Artificial
  YADS_11CDR-H2
SIAPYAGSTAYADSVKG

SEQ ID NO: 315 - protein, 11 aa, Artificial
  YADS_11 CDR-H3
AAAAYAYAMDY

SEQ ID NO: 316 - protein, 250 aa, Artificial
  YADS_11 HC
MKKNIAFLLASMFVFSIATNAYAEVQLVESGGGLVQPGGSLRLSCAASGFDIAYYDIHWVRQAPGKGLEWVASIAPYAGSTAYADSVKGRFTISADTSKNTAYLQMNSLRAEDTAVYYCSRAAAAYAYAMDYWGQGTLVTVSSASTKGPSVFPLAPSSKSTSGGTAALGCLVKDYFPEPVTVSWNSGALTSGVHTFPAVLQSSGLYSLSSVVTVPSSSLGTQTYICNVNHKPSNTKVDKKVEPKSCDKTH

SEQ ID NO: 317 - protein, 10 aa, Artificial
  YADS_12 CDR-H1
GFAIDYYDIH

SEQ ID NO: 318 - protein, 17 aa, Artificial
  YADS_12CDR-H2
SIAPYAGSTYYADSVKG

SEQ ID NO: 319 - protein, 11 aa, Artificial
  YADS_12 CDR-H3
SAAYYAYAMDY

SEQ ID NO: 320 - protein, 250 aa, Artificial
  YADS_12 HC
MKKNIAFLLASMFVFSIATNAYAEVQLVESGGGLVQPGGSLRLSCAASGFAIDYYDIHWVRQAPGKGLEWVASIAPYAGSTYYADSVKGRFTISADTSKNTAYLQMNSLRAEDTAVYYCSRSAAYYAYAMDYWGQGTLVTVSSASTKGPSVFPLAPSSKSTSGGTAALGCLVKDYFPEPVTVSWNSGALTSGVHTFPAVLQSSGLYSLSSVVTVPSSSLGTQTYICNVNHKPSNTKVDKKVEPKSCDKTH

SEQ ID NO: 321 - protein, 10 aa, Artificial
  YADS_13 CDR-H1
GFAIAYDDIH

SEQ ID NO: 322 - protein, 17 aa, Artificial
  YADS_13 CDR-H2
SIAPYAGATAYADSVKG

SEQ ID NO: 323 - protein, 11 aa, Artificial
  YADS_13 CDR-H3
AAAYAAYAMDY

SEQ ID NO: 324 - protein, 250 aa, Artificial
  YADS_13 HC
MKKNIAFLLASMFVFSIATNAYAEVQLVESGGGLVQPGGSLRLSCAASGFAIAYDDIHWVRQAPGKGLEWVASIAPYAGATAYADSVKGRFTISADTSKNTAYLQMNSLRAEDTAVYYCSRAAAYAAYAMDYWGQGTLVTVSSASTKGPSVFPLAPSSKSTSGGTAALGCLVKDYFPEPVTVSWNSGALTSGVHTFPAVLQSSGLYSLSSVVTVPSSSLGTQTYICNVNHKPSNTKVDKKVEPKSCDKTH

SEQ ID NO: 325 - protein, 10 aa, Artificial
  YADS_14 CDR-H1
GFAIAAYDIH

SEQ ID NO: 326 - protein, 17 aa, Artificial
  YADS_14 CDR-H2
SISPYAGATSYADSVKG

SEQ ID NO: 327 - protein, 11 aa, Artificial
  YADS_14 CDR-H3
AAAYYYDAMDY

SEQ ID NO: 328 - protein, 250 aa, Artificial
  YADS_14 HC
MKKNIAFLLASMFVFSIATNAYAEVQLVESGGGLVQPGGSLRLSCAASGFAIAAYDIHWVRQAPGKGLEWVASISPYAGATSYADSVKGRFTISADTSKNTAYLQMNSLRAEDTAVYYCSRAAAYYYDAMDYWGQGTLVTVSSASTKGPSVFPLAPSSKSTSGGTAALGCLVKDYFPEPVTVSWNSGALTSGVHTFPAVLQSSGLYSLSSVVTVPSSSLGTQTYICNVNHKPSNTKVDKKVEPKSCDKTH

SEQ ID NO: 329 - protein, 10 aa, Artificial
  YADS_15 CDR-H1
GFYIADAAIH

SEQ ID NO: 330 - protein, 17 aa, Artificial
  YADS_15 CDR-H2
SIYPSAGATYYADSVKG

SEQ ID NO: 331 - protein, 11 aa, Artificial
  YADS_15 CDR-H3
AYDSDYYAMDY

SEQ ID NO: 332 - protein, 250 aa, Artificial
  YADS_15 HC
MKKNIAFLLASMFVFSIATNAYAEVQLVESGGGLVQPGGSLRLSCAASGFYIADAAIHWVRQAPGKGLEWVASIYPSAGATYYADSVKGRFTISADTSKNTAYLQMNSLRAEDTAVYYCSRAYDSDYYAMDYWGQGTLVTVSSASTKGPSVFPLAPSSKSTSGGTAALGCLVKDYFPEPVTVSWNSGALTSGVHTFPAVLQSSGLYSLSSVVTVPSSSLGTQTYICNVNHKPSNTKVDKKVEPKSCDKTH

SEQ ID NO: 333 - protein, 10 aa, Artificial
  YADS_16 CDR-H1
GFAIYDYDIH

SEQ ID NO: 334 - protein, 17 aa, Artificial
  YADS_16 CDR-H2
DIAPYAGATAYADSVKG

SEQ ID NO: 335 - protein, 11 aa, Artificial
  YADS_16 CDR-H3
SSYAYYAAMDY

SEQ ID NO: 336 - protein, 250 aa, Artificial
  YADS_16 HC
MKKNIAFLLASMFVFSIATNAYAEVQLVESGGGLVQPGGSLRLSCAASGFAIYDYDIHWVRQAPGKGLEWVADIAPYAGATAYADSVKGRFTISADTSKNTAYLQMNSLRAEDTAVYYCSRSSYAYYAAMDYWGQGTLVTVSSASTKGPSVFPLAPSSKSTSGGTAALGCLVKDYFPEPVTVSWNSGALTSGVHTFPAVLQSSGLYSLSSVVTVPSSSLGTQTYICNVNHKPSNTKVDKKVEPKSCDKTH

SEQ ID NO: 337 - protein, 10 aa, Artificial
  YADS_17 CDR-H1
GFDIYDYSIH

SEQ ID NO: 338 - protein, 17 aa, Artificial
  YADS_17 CDR-H2
YISPYSGATAYADSVKG

SEQ ID NO: 339 - protein, 11 aa, Artificial
  YADS_17 CDR-H3
SSYAYYDAMDY

SEQ ID NO: 340 - protein, 250 aa, Artificial
  YADS_17 HC
MKKNIAFLLASMFVFSIATNAYAEVQLVESGGGLVQPGGSLRLSCAASGFDIYDYSIHWVRQAPGKGLEWVAYISPYSGATAYADSVKGRFTISADTSKNTAYLQMNSLRAEDTAVYYCSRSSYAYYDAMDYWGQGTLVTVSSASTKGPSVFPLAPSSKSTSGGTAALGCLVKDYFPEPVTVSWNSGALTSGVHTFPAVLQSSGLYSLSSVVTVPSSSLGTQTYICNVNHKPSNTKVDKKVEPKSCDKTH

SEQ ID NO: 341 - protein, 10 aa, Artificial
  YADS_18 CDR-H1
GFAIAAYAIH

SEQ ID NO: 342 - protein, 17 aa, Artificial
  YADS_18 CDR-H2
DIYPAAGDTAYADSVKG

SEQ ID NO: 343 - protein, 13 aa, Artificial
  YADS_18 CDR-H3
SYYYSYSSYAMDY

SEQ ID NO: 344 - protein, 252 aa, Artificial
  YADS_18 HC
MKKNIAFLLASMFVFSIATNAYAEVQLVESGGGLVQPGGSLRLSCAASGFAIAAYAIHWVRQAPGKGLEWVADIYPAAGDTAYADSVKGRFTISADTSKNTAYLQMNSLRAEDTAVYYCSRSYYYSYSSYAMDYWGQGTLVTVSSASTKGPSVFPLAPSSKSTSGGTAALGCLVKDYFPEPVTVSWNSGALTSGVHTFPAVLQSSGLYSLSSVVTVPSSSLGTQTYICNVNHKPSNTKVDKKVEPKSCDKTH

SEQ ID NO: 345 - protein, 17 aa, Artificial
  YADS_19 CDR-H2
DIYPASGYTSYADSVKG

SEQ ID NO: 346 - protein, 12 aa, Artificial
  YADS_19 CDR-H3
AYDYYAAVAMDY

SEQ ID NO: 347 - protein, 10 aa, Artificial
  YADS_20 HVL-H1
GFDISAYAIH

SEQ ID NO: 348 - protein, 17 aa, Artificial
  YADS_20 CDR-H2
YISPSSGATAYADSVKG

SEQ ID NO: 349 - protein, 11 aa, Artificial
  YADS_20 CDR-H3
SAYYSYAAMDY

SEQ ID NO: 350 - protein, 250 aa, Artificial
  YADS_20 HC
MKKNIAFLLASMFVFSIATNAYAEVQLVESGGGLVQPGGSLRLSCAASGFDISAYAIHWVRQAPGKGLEWVAYISPSSGATAYADSVKGRFTISADTSKNTAYLQMNSLRAEDTAVYYCSRSAYYSYAAMDYWGQGTLVTVSSASTKGPSVFPLAPSSKSTSGGTAALGCLVKDYFPEPVTVSWNSGALTSGVHTFPAVLQSSGLYSLSSVVTVPSSSLGTQTYICNVNHKPSNTKVDKKVEPKSCDKTH

SEQ ID NO: 351 - protein, 17 aa, Artificial
  YADS_21 CDR-H2
SIAPYYGATAYADSVKG

SEQ ID NO: 352 - protein, 11 aa, Artificial
  YADS_21 CDR-H3
AAYSYYSAMDY

SEQ ID NO: 353 - protein, 16 aa, Artificial
  YADS_22 CDR-H2
SISPYSGYTAYADSVK

SEQ ID NO: 354 - protein, 12 aa, Artificial
  YADS_22 CDR-H3
AYYYYYYAAMDY

SEQ ID NO: 355 - protein, 10 aa, Artificial
  YADS_23 CDR-H1
GFDIYDDDIH

SEQ ID NO: 356 - protein, 17 aa, Artificial
  YADS_23 CDR-H2
YIAPSYGYTDYADSVKG

SEQ ID NO: 357 - protein, 13 aa, Artificial
  YADS_23 CDR-H3
SSDASYSYSAMDY

SEQ ID NO: 358 - protein, 252 aa, Artificial; identical to SEQ ID NO: 20
  YADS_23 HC

SEQ ID NO: 359 - protein, 17 aa, Artificial
  YADS_24 CDR-H2
SIYPSSGDTYYADSVKG

SEQ ID NO: 360 - protein, 12 aa, Artificial
  YADS_24 CDR-H3
DVSYSSYYAMDY

SEQ ID NO: 361 - protein, 11 aa, Artificial
  G6 CDR-L1
RASQDVSTAVA

SEQ ID NO: 362 - protein, 7 aa, Artificial
  G6 CDR-L2
SASFLYS

SEQ ID NO: 363 - protein, 9 aa, Artificial
  G6 CDR-L3
QQSYTTPPT

SEQ ID NO: 364 - protein, 214 aa, Artificial; identical to SEQ ID NO: 28
  G6 LC

SEQ ID NO: 365 - protein, 11 aa, Artificial
  G6_72 CDR-L1
RASQDVASSVA

SEQ ID NO: 366 - protein, 7 aa, Artificial
  G6_72 CDR-L2
AASFLYS

SEQ ID NO: 367 - protein, 9 aa, Artificial
  G6_72 CDR-L3
KQAFSSPPT

SEQ ID NO: 368 - protein, 214 aa, Artificial
  G6_72 LC
DIQMTQSPSSLSASVGDRVTITCRASQDVASSVAWYQQKPGKAPKLLIYAASFLYSGVPSRFSGSGSGTDFTLTISSLQPEDFATYYCKQAFSSPPTFGQGTKVEIKRTVAAPSVFIFPPSDEQLKSGTASVVCLLNNFYPREAKVQWKVDNALQSGNSQESVTEQDSKDSTYSLSSTLTLSKADYEKHKVYACEVTHQGLSSPVTKSFNRGEC

SEQ ID NO: 369 - protein, 11 aa, Artificial
  G6_14 CDR-L1
RASQDVATSVA

SEQ ID NO: 370 - protein, 7 aa, Artificial
  G6_14 CDR-L2
AASFLYS

SEQ ID NO: 371 - protein, 9 aa, Artificial
  G6_14 CDR-L3
EQAFTSPPT

SEQ ID NO: 372 - protein, 214 aa, Artificial
  G6_14 LC
DIQMTQSPSSLSASVGDRVTITCRASQDVATSVAWYQQKPGKAPKLLIYAASFLYSGVPSRFSGSGSGTDFTLTISSLQPEDFATYYCEQAFTSPPTFGQGTKVEIKRTVAAPSVFIFPPSDEQLKSGTASVVCLLNNFYPREAKVQWKVDNALQSGNSQESVTEQDSKDSTYSLSSTLTLSKADYEKHKVYACEVTHQGLSSPVTKSFNRGEC

SEQ ID NO: 373 - protein, 11 aa, Artificial
  G6_43 CDR-L1
RASQDVSSAVA

SEQ ID NO: 374 - protein, 7 aa, Artificial
  G6_43 CDR-L2
SASYLYS

SEQ ID NO: 375 - protein, 9 aa, Artificial
  G6_43 CDR-L3
QEAFTSPPT

SEQ ID NO: 376 - protein, 214 aa, Artificial
  G6_43 LC
DIQMTQSPSSLSASVGDRVTITCRASQDVSSAVAWYQQKPGKAPKLLIYSASYLYSGVPSRFSGSGSGTDFTLTISSLQPEDFATYYCQEAFTSPPTFGQGTKVEIKRTVAAPSVFIFPPSDEQLKSGTASVVCLLNNFYPREAKVQWKVDNALQSGNSQESVTEQDSKDSTYSLSSTLTLSKADYEKHKVYACEVTHQGLSSPVTKSFNRGEC

SEQ ID NO: 377 - protein, 11 aa, Artificial
  G6_54 CDR-L1
RASEEVATSVA

SEQ ID NO: 378 - protein, 7 aa, Artificial
  G6_54 CDR-L2
AASYLYS

SEQ ID NO: 379 - protein, 9 aa, Artificial
  G6_54 CDR-L3
EEAFTSPPT

SEQ ID NO: 380 - protein, 214 aa, Artificial
  G6_54 LC
DIQMTQSPSSLSASVGDRVTITCRASEEVATSVAWYQQKPGKAPKLLIYAASYLYSGVPSRFSGSGSGTDFTLTISSLQPEDFATYYCEEAFTSPPTFGQGTKVEIKRTVAAPSVFIFPPSDEQLKSGTASVVCLLNNFYPREAKVQWKVDNALQSGNSQESVTEQDSKDSTYSLSSTLTLSKADYEKHKVYACEVTHQGLSSPVTKSFNRGEC

SEQ ID NO: 381 - protein, 11 aa, Artificial
  G6_5 CDR-L1
RASQDVATAVA

SEQ ID NO: 382 - protein, 7 aa, Artificial
  G6_5 CDR-L2
SASYLYS

SEQ ID NO: 383 - protein, 9 aa, Artificial
  G6_5 CDR-L3
EEAYTSPPT

SEQ ID NO: 384 - protein, 214 aa, Artificial
  G6_5 LC
DIQMTQSPSSLSASVGDRVTITCRASQDVATAVAWYQQKPGKAPKLLIYSASYLYSGVPSRFSGSGSGTDFTLTISSLQPEDFATYYCEEAYTSPPTFGQGTKVEIKRTVAAPSVFIFPPSDEQLKSGTASVVCLLNNFYPREAKVQWKVDNALQSGNSQESVTEQDSKDSTYSLSSTLTLSKADYEKHKVYACEVTHQGLSSPVTKSFNRGEC

SEQ ID NO: 385 - protein, 11 aa, Artificial
  G6_44 CDR-L1
RASQDVASSVA

SEQ ID NO: 386 - protein, 7 aa, Artificial
  G6_44 CDR-L2
AASYLYS

SEQ ID NO: 387 - protein, 9 aa, Artificial
  G6_44 CDR-L3
QEAFTSPPT

SEQ ID NO: 388 - protein, 214 aa, Artificial
  G6_44 LC
DIQMTQSPSSLSASVGDRVTITCRASQDVASSVAWYQQKPGKAPKLLIYAASYLYSGVPSRFSGSGSGTDFTLTISSLQPEDFATYYCQEAFTSPPTFGQGTKVEIKRTVAAPSVFIFPPSDEQLKSGTASVVCLLNNFYPREAKVQWKVDNALQSGNSQESVTEQDSKDSTYSLSSTLTLSKADYEKHKVYACEVTHQGLSSPVTKSFNRGEC

SEQ ID NO: 389 - protein, 11 aa, Artificial
  G6_83 CDR-L1
RASQEVASAVA

SEQ ID NO: 390 - protein, 7 aa, Artificial
  G6_83 CDR-L2
SASFLYS

SEQ ID NO: 391 - protein, 9 aa, Artificial
  G6_83 CDR-L3
QQAYSSPAT

SEQ ID NO: 392 - protein, 214 aa, Artificial
  G6_83 LC
DIQMTQSPSSLSASVGDRVTITCRASQEVASAVAWYQQKPGKAPKLLIYSASFLYSGVPSRFSGSGSGTDFTLTISSLQPEDFATYYCQQAYSSPATFGQGTKVEIKRTVAAPSVFIFPPSDEQLKSGTASVVCLLNNFYPREAKVQWKVDNALQSGNSQESVTEQDSKDSTYSLSSTLTLSKADYEKHKVYACEVTHQGLSSPVTKSFNRGEC

SEQ ID NO: 393 - protein, 11 aa, Artificial
  G6_78 CDR-L1
RASQDVSTAVA

SEQ ID NO: 394 - protein, 7 aa, Artificial
  G6_78 CDR-L2
SASFLYS

SEQ ID NO: 395 - protein, 9 aa, Artificial
  G6_78 CDR-L3
KQAFSSPPT

SEQ ID NO: 396 - protein, 214 aa, Artificial
  G6_78 LC
DIQMTQSPSSLSASVGDRVTITCRASQDVSTAVAWYQQKPGKAPKLLIYSASFLYSGVPSRFSGSGSGTDFTLTISSLQPEDFATYYCKQAFSSPPTFGQGTKVEIKRTVAAPSVFIFPPSDEQLKSGTASVVCLLNNFYPREAKVQWKVDNALQSGNSQESVTEQDSKDSTYSLSSTLTLSKADYEKHKVYACEVTHQGLSSPVTKSFNRGEC

SEQ ID NO: 397 - protein, 11 aa, Artificial
  G6_46 CDR-L1
RASEDISTAVA

SEQ ID NO: 398 - protein, 7 aa, Artificial
  G6_46 CDR-L2
SASFLFS

SEQ ID NO: 399 - protein, 9 aa, Artificial
  G6_46 CDR-L3
QQAFTTPPT

SEQ ID NO: 400 - protein, 214 aa, Artificial
  G6_46 LC
DIQMTQSPSSLSASVGDRVTITCRASEDISTAVAWYQQKPGKAPKLLIYSASFLFSGVPSRFSGSGSGTDFTLTISSLQPEDFATYYCQQAFTTPPTFGQGTKVEIKRTVAAPSVFIFPPSDEQLKSGTASVVCLLNNFYPREAKVQWKVDNALQSGNSQESVTEQDSKDSTYSLSSTLTLSKADYEKHKVYACEVTHQGLSSPVTKSFNRGEC

SEQ ID NO: 401 - protein, 11 aa, Artificial
  G6_57 CDR-L1
RASQEISTSVA

SEQ ID NO: 402 - protein, 7 aa, Artificial
  G6_57 CDR-L2
AASYLYS

SEQ ID NO: 403 - protein, 9 aa, Artificial
  G6_57 CDR-L3
QQAFSSPPT

SEQ ID NO: 404 - protein, 214 aa, Artificial
  G6_57 LC
DIQMTQSPSSLSASVGDRVTITCRASQEISTSVAWYQQKPGKAPKLLIYAASYLYSGVPSRFSGSGSGTDFTLTISSLQPEDFATYYCQQAFSSPPTFGQGTKVEIKRTVAAPSVFIFPPSDEQLKSGTASVVCLLNNFYPREAKVQWKVDNALQSGNSQESVTEQDSKDSTYSLSSTLTLSKADYEKHKVYACEVTHQGLSSPVTKSFNRGEC

SEQ ID NO: 405 - protein, 11 aa, Artificial
  G6_61 CDR-L1
RASQDVASSVA

SEQ ID NO: 406 - protein, 7 aa, Artificial
  G6_61 CDR-L2
AASYLYS

SEQ ID NO: 407 - protein, 9 aa, Artificial
  G6_61 CDR-L3
EQAYSSPPT

SEQ ID NO: 408 - protein, 214 aa, Artificial
  G6_61 LC
DIQMTQSPSSLSASVGDRVTITCRASQDVASSVAWYQQKPGKAPKLLIYAASYLYSGVPSRFSGSGSGTDFTLTISSLQPEDFATYYCEQAYSSPPTFGQGTKVEIKRTVAAPSVFIFPPSDEQLKSGTASVVCLLNNFYPREAKVQWKVDNALQSGNSQESVTEQDSKDSTYSLSSTLTLSKADYEKHKVYACEVTHQGLSSPVTKSFNRGEC

SEQ ID NO: 409 - protein, 11 aa, Artificial
  G6_16 CDR-L1
RASEDVSTSVA

SEQ ID NO: 410 - protein, 7 aa, Artificial
  G6_16 CDR-L2
AASYLYS

SEQ ID NO: 411 - protein, 9 aa, Artificial
  G6_16 CDR-L3
EQAFTNPPT

SEQ ID NO: 412 - protein, 214 aa, Artificial
  G6_16 LC
DIQMTQSPSSLSASVGDRVTITCRASEDVSTSVAWYQQKPGKAPKLLIYAASYLYSGVPSRFSGSGSGTDFTLTISSLQPEDFATYYCEQAFTNPPTFGQGTKVEIKRTVAAPSVFIFPPSDEQLKSGTASVVCLLNNFYPREAKVQWKVDNALQSGNSQESVTEQDSKDSTYSLSSTLTLSKADYEKHKVYACEVTHQGLSSPVTKSFNRGEC

SEQ ID NO: 413 - protein, 11 aa, Artificial
  G6_71 CDR-L1
RASQDVATAVA

SEQ ID NO: 414 - protein, 7 aa, Artificial
  G6_71 CDR-L2
SASFLFS

SEQ ID NO: 415 - protein, 9 aa, Artificial
  G6_71 CDR-L3
EEAYTSPPT

SEQ ID NO: 416 - protein, 214 aa, Artificial
  G6_71 LC
DIQMTQSPSSLSASVGDRVTITCRASQDVATAVAWYQQKPGKAPKLLIYSASFLFSGVPSRFSGSGSGTDFTLTISSLQPEDFATYYCEEAYTSPPTFGQGTKVEIKRTVAAPSVFIFPPSDEQLKSGTASVVCLLNNFYPREAKVQWKVDNALQSGNSQESVTEQDSKDSTYSLSSTLTLSKADYEKHKVYACEVTHQGLSSPVTKSFNRGEC

SEQ ID NO: 417 - protein, 11 aa, Artificial
  G6_85 CDR-L1
RASEDIASSVA

SEQ ID NO: 418 - protein, 7 aa, Artificial
  G6_85 CDR-L2
AASYLFS

SEQ ID NO: 419 - protein, 9 aa, Artificial
  G6_85 CDR-L3
QQAFSSPPT

SEQ ID NO: 420 - protein, 214 aa, Artificial
  G6_85 LC
DIQMTQSPSSLSASVGDRVTITCRASEDIASSVAWYQQKPGKAPKLLIYAASYLFSGVPSRFSGSGSGTDFTLTISSLQPEDFATYYCQQAFSSPPTFGQGTKVEIKRTVAAPSVFIFPPSDEQLKSGTASVVCLLNNFYPREAKVQWKVDNALQSGNSQESVTEQDSKDSTYSLSSTLTLSKADYEKHKVYACEVTHQGLSSPVTKSFNRGEC

SEQ ID NO: 421 - protein, 11 aa, Artificial
  G6_58 CDR-L1
RASEEVSTAVA

SEQ ID NO: 422 - protein, 7 aa, Artificial
  G6_58 CDR-L2
AASFLYS

SEQ ID NO: 423 - protein, 9 aa, Artificial
  G6_58 CDR-L3
QQAFTSPAT

SEQ ID NO: 424 - protein, 214 aa, Artificial
  G6_58 LC
DIQMTQSPSSLSASVGDRVTITCRASEEVSTAVAWYQQKPGKAPKLLIYAASFLYSGVPSRFSGSGSGTDFTLTISSLQPEDFATYYCQQAFTSPATFGQGTKVEIKRTVAAPSVFIFPPSDEQLKSGTASVVCLLNNFYPREAKVQWKVDNALQSGNSQESVTEQDSKDSTYSLSSTLTLSKADYEKHKVYACEVTHQGLSSPVTKSFNRGEC

SEQ ID NO: 425 - protein, 11 aa, Artificial
  G6_67 CDR-L1
RASQEISSSVA

SEQ ID NO: 426 - protein, 7 aa, Artificial
  G6_67 CDR-L2
SASYLYS

SEQ ID NO: 427 - protein, 9 aa, Artificial
  G6_67 CDR-L3
QEAFTTPPT

SEQ ID NO: 428 - protein, 214 aa, Artificial
  G6_67 LC
DIQMTQSPSSLSASVGDRVTITCRASQEISSSVAWYQQKPGKAPKLLIYSASYLYSGVPSRFSGSGSGTDFTLTISSLQPEDFATYYCQEAFTTPPTFGQGTKVEIKRTVAAPSVFIFPPSDEQLKSGTASVVCLLNNFYPREAKVQWKVDNALQSGNSQESVTEQDSKDSTYSLSSTLTLSKADYEKHKVYACEVTHQGLSSPVTKSFNRGEC

SEQ ID NO: 429 - protein, 11 aa, Artificial
  G6_53 CDR-L1
RASEDIASSVA

SEQ ID NO: 430 - protein, 7 aa, Artificial
  G6_53 CDR-L2
SASYLYS

SEQ ID NO: 431 - protein, 9 aa, Artificial
  G6_53 CDR-L3
EESFSTPPT

SEQ ID NO: 432 - protein, 214 aa, Artificial
  G6_53 LC
DIQMTQSPSSLSASVGDRVTITCRASEDIASSVAWYQQKPGKAPKLLIYSASYLYSGVPSRFSGSGSGTDFTLTISSLQPEDFATYYCEESFSTPPTFGQGTKVEIKRTVAAPSVFIFPPSDEQLKSGTASVVCLLNNFYPREAKVQWKVDNALQSGNSQESVTEQDSKDSTYSLSSTLTLSKADYEKHKVYACEVTHQGLSSPVTKSFNRGEC

SEQ ID NO: 433 - protein, 11 aa, Artificial
  G6_50 CDR-L1
RASQDISSSVA

SEQ ID NO: 434 - protein, 7 aa, Artificial
  G6_50 CDR-L2
AASFLYS

SEQ ID NO: 435 - protein, 9 aa, Artificial
  G6_50 CDR-L3
QQAFTSPPT

SEQ ID NO: 436 - protein, 214 aa, Artificial
  G6_50 LC
DIQMTQSPSSLSASVGDRVTITCRASQDISSSVAWYQQKPGKAPKLLIYAASFLYSGVPSRFSGSGSGTDFTLTISSLQPEDFATYYCQQAFTSPPTFGQGTKVEIKRTVAAPSVFIFPPSDEQLKSGTASVVCLLNNFYPREAKVQWKVDNALQSGNSQESVTEQDSKDSTYSLSSTLTLSKADYEKHKVYACEVTHQGLSSPVTKSFNRGEC

SEQ ID NO: 437 - protein, 11 aa, Artificial
  G6_56 CDR-L1
RASEDVSTSVA

SEQ ID NO: 438 - protein, 7 aa, Artificial
  G6_56 CDR-L2
AASYLYS

SEQ ID NO: 439 - protein, 9 aa, Artificial
  G6_56 CDR-L3
EEAFTTPPT

SEQ ID NO: 440 - protein, 214 aa, Artificial
  G6_56 LC
DIQMTQSPSSLSASVGDRVTITCRASEDVSTSVAWYQQKPGKAPKLLIYAASYLYSGVPSRFSGSGSGTDFTLTISSLQPEDFATYYCEEAFTTPPTFGQGTKVEIKRTVAAPSVFIFPPSDEQLKSGTASVVCLLNNFYPREAKVQWKVDNALQSGNSQESVTEQDSKDSTYSLSSTLTLSKADYEKHKVYACEVTHQGLSSPVTKSFNRGEC

SEQ ID NO: 441 - protein, 11 aa, Artificial
  G6_32 CDR-L1
RASQDISSSVA

SEQ ID NO: 442 - protein, 7 aa, Artificial
  G6_32 CDR-L2
SASYLYS

SEQ ID NO: 443 - protein, 9 aa, Artificial
  G6_32 CDR-L3
KQSYSSPPT

SEQ ID NO: 444 - protein, 214 aa, Artificial
  G6_32 LC
DIQMTQSPSSLSASVGDRVTITCRASQDISSSVAWYQQKPGKAPKLLIYSASYLYSGVPSRFSGSGSGTDFTLTISSLQPEDFATYYCKQSYSSPPTFGQGTKVEIKRTVAAPSVFIFPPSDEQLKSGTASVVCLLNNFYPREAKVQWKVDNALQSGNSQESVTEQDSKDSTYSLSSTLTLSKADYEKHKVYACEVTHQGLSSPVTKSFNRGEC

SEQ ID NO: 445 - protein, 11 aa, Artificial
  G6_15 CDR-L1
RASEDISSAVA

SEQ ID NO: 446 - protein, 7 aa, Artificial
  G6_15 CDR-L2
SASFLYS

SEQ ID NO: 447 - protein, 9 aa, Artificial
  G6_15 CDR-L3
EEAYTSPPT

SEQ ID NO: 448 - protein, 214 aa, Artificial
  G6_15 LC
DIQMTQSPSSLSASVGDRVTITCRASEDISSAVAWYQQKPGKAPKLLIYSASFLYSGVPSRFSGSGSGTDFTLTISSLQPEDFATYYCEEAYTSPPTFGQGTKVEIKRTVAAPSVFIFPPSDEQLKSGTASVVCLLNNFYPREAKVQWKVDNALQSGNSQESVTEQDSKDSTYSLSSTLTLSKADYEKHKVYACEVTHQGLSSPVTKSFNRGEC

SEQ ID NO: 449 - protein, 11 aa, Artificial
  G6_62 CDR-L1
RASEEISSSVA

SEQ ID NO: 450 - protein, 7 aa, Artificial
  G6_62 CDR-L2
SASFLYS

SEQ ID NO: 451 - protein, 9 aa, Artificial
  G6_62 CDR-L3
EESFTTPPT

SEQ ID NO: 452 - protein, 214 aa, Artificial
  G6_62 LC
DIQMTQSPSSLSASVGDRVTITCRASEEISSSVAWYQQKPGKAPKLLIYSASFLYSGVPSRFSGSGSGTDFTLTISSLQPEDFATYYCEESFTTPPTFGQGTKVEIKRTVAAPSVFIFPPSDEQLKSGTASVVCLLNNFYPREAKVQWKVDNALQSGNSQESVTEQDSKDSTYSLSSTLTLSKADYEKHKVYACEVTHQGLSSPVTKSFNRGEC

SEQ ID NO: 453 - protein, 11 aa, Artificial
  G6_64 CDR-L1
RASQEVATAVA

SEQ ID NO: 454 - protein, 7 aa, Artificial
  G6_64 CDR-L2
SASFLYS

SEQ ID NO: 455 - protein, 9 aa, Artificial
  G6_64 CDR-L3
QQAFSSPAT

SEQ ID NO: 456 - protein, 214 aa, Artificial
  G6_64 LC
DIQMTQSPSSLSASVGDRVTITCRASQEVATAVAWYQQKPGKAPKLLIFSASFLYSGVPSRFSGSGSGTDFTLTISSLQPEDFATYYCQQAFSSPATFGQGTKVEIKRTVAAPSVFIFPPSDEQLKSGTASVVCLLNNFYPREAKVQWKVDNALQSGNSQESVTEQDSKDSTYSLSSTLTLSKADYEKHKVYACEVTHQGLSSPVTKSFNRGEC

SEQ ID NO: 457 - protein, 11 aa, Artificial
  G6_4 CDR-L1
RASEDVASAVA

SEQ ID NO: 458 - protein, 7 aa, Artificial
  G6_4 CDR-L2
AASYLYS

SEQ ID NO: 459 - protein, 9 aa, Artificial
  G6_4 CDR-L3
QESYSSPPT

SEQ ID NO: 460 - protein, 214 aa, Artificial
  G6_4 LC
DIQMTQSPSSLSASVGDRVTITCRASEDVASAVAWYQQKPGKAPKLLIYAASYLYSGVPSRFSGSGSGTDFTLTISSLQPEDFATYYCQESYSSPPTFGQGTKVEIKRTVAAPSVFIFPPSDEQLKSGTASVVCLLNNFYPREAKVQWKVDNALQSGNSQESVTEQDSKDSTYSLSSTLTLSKADYEKHKVYACEVTHQGLSSPVTKSFNRGEC

SEQ ID NO: 461 - protein, 11 aa, Artificial
  G6_25 CDR-L1
RASQDVSSSVA

SEQ ID NO: 462 - protein, 7 aa, Artificial
  G6_25 CDR-L2
AASYLYS

SEQ ID NO: 463 - protein, 9 aa, Artificial
  G6_25 CDR-L3
QEAFSSPAT

SEQ ID NO: 464 - protein, 214 aa, Artificial
  G6_25 LC
DIQMTQSPSSLSASVGDRVTITCRASQDVSSSVAWYQQKPGKAPKLLIYAASYLYSGVPSRFSGSGSGTDFTLTISSLQPEDFATYYCQEAFSSPATFGQGTKVEIKRTVAAPSVFIFPPSDEQLKSGTASVVCLLNNFYPREAKVQWKVDNALQSGNSQESVTEQDSKDSTYSLSSTLTLSKADYEKHKVYACEVTHQGLSSPVTKSFNRGEC

SEQ ID NO: 465 - protein, 11 aa, Artificial
  G6_86 CDR-L1
RASQDIATSVA

SEQ ID NO: 466 - protein, 7 aa, Artificial
  G6_86 CDR-L2
AASFLFS

SEQ ID NO: 467 - protein, 9 aa, Artificial
  G6_86 CDR-L3
QQSYTNPPT

SEQ ID NO: 468 - protein, 214 aa, Artificial
  G6_86 LC
DIQMTQSPSSLSASVGDRVTITCRASQDIATSVAWYQQKPGKAPKLLIYAASFLFSGVPSRFSGSGSGTDFTLTISSLQPEDFATYYCQQSYTNPPTFGQGTKVEIKRTVAAPSVFIFPPSDEQLKSGTASVVCLLNNFYPREAKVQWKVDNALQSGNSQESVTEQDSKDSTYSLSSTLTLSKADYEKHKVYACEVTHQGLSSPVTKSFNRGEC

SEQ ID NO: 469 - protein, 11 aa, Artificial
  G6_74 CDR-L1
RASEEVASSVA

SEQ ID NO: 470 - protein, 7 aa, Artificial
  G6_74 CDR-L2
SASYLYS

SEQ ID NO: 471 - protein, 9 aa, Artificial
  G6_74 CDR-L3
QKAYSTPPT

SEQ ID NO: 472 - protein, 214 aa, Artificial
  G6_74 LC
DIQMTQSPSSLSASVGDRVTITCRASEEVASSVAWYQQKPGKAPKLLIYSASYLYSGVPSRFSGSGSGTDFTLTISSLQPEDFATYYCQKAYSTPPTFGQGTKVEIKRTVAAPSVFIFPPSDEQLKSGTASVVCLLNNFYPREAKVQWKVDNALQSGNSQESVTEQDSKDSTYSLSSTLTLSKADYEKHKVYACEVTHQGLSSPVTKSFNRGEC

SEQ ID NO: 473 - protein, 10 aa, Artificial
  G6 CDR-H1
GFTISDYWIH

SEQ ID NO: 474 - protein, 17 aa, Artificial
  G6 CDR-H2
GITPAGGYTYYADSVKG

SEQ ID NO: 475 - protein, 11 aa, Artificial
  G6 CDR-H3
FVFFLPYAMDY

SEQ ID NO: 476 - protein, 227 aa, Artificial; identical to SEQ ID NO: 31
  G6 HC

SEQ ID NO: 477 - protein, 10 aa, Artificial
  G6_87 CDR-H1
GFTISDFWIH

SEQ ID NO: 478 - protein, 17 aa, Artificial
  G6_87 CDR-H2
GVTPAGGYSYYADSVKG

SEQ ID NO: 479 - protein, 11 aa, Artificial
  G6_87 CDR-H3
FVFFLPYAMDY

SEQ ID NO: 480 - protein, 227 aa, Artificial
  G6_87 HC
EVQLVESGGGLVQPGGSLRLSCAASGFTISDFWIHWVRQAPGKGLEWVAGVTPAGGYSYYADSVKGRFTISADTSKNTAYLQMNSLRAEDTAVYYCARFVFFLPYAMDYWGQGTLVTVSSASTKGPSVFPLAPSSKSTSGGTAALGCLVKDYFPEPVTVSWNSGALTSGVHTFPAVLQSSGLYSLSSVVTVPSSSLGTQTYICNVNHKPSNTKVDKKVEPKSCDKTH

SEQ ID NO: 481 - protein, 10 aa, Artificial
  G6_88 CDR-H1
GFTIAEYWIH

SEQ ID NO: 482 - protein, 17 aa, Artificial
  G6_88 CDR-H2
GVTPAGGYTFYADSVKG

SEQ ID NO: 483 - protein, 11 aa, Artificial
  G6_88 CDR-H3
FVFFLPYAMDY

SEQ ID NO: 484 - protein, 227 aa, Artificial
  G6_88 HC
EVQLVESGGGLVQPGGSLRLSCAASGFTIAEYWIHWVRQAPGKGLEWVAGVTPAGGYTFYADSVKGRFTISADTSKNTAYLQMNSLRAEDTAVYYCARFVFFLPYAMDYWGQGTLVTVSSASTKGPSVFPLAPSSKSTSGGTAALGCLVKDYFPEPVTVSWNSGALTSGVHTFPAVLQSSGLYSLSSVVTVPSSSLGTQTYICNVNHKPSNTKVDKKVEPKSCDKTH

SEQ ID NO: 485 - protein, 10 aa, Artificial
  G6_89 CDR-H1
GFTISDFWIH

SEQ ID NO: 486 - protein, 17 aa, Artificial
  G6_89 CDR-H2
GITAAGGFSYYADSVKG

SEQ ID NO: 487 - protein, 11 aa, Artificial
  G6_89 CDR-H3
FVFFLPYAMDY

SEQ ID NO: 488 - protein, 227 aa, Artificial
  G6_89 HC
EVQLVESGGGLVQPGGSLRLSCAASGFTISDFWIHWVRQAPGKGLEWVAGITAAGGFSYYADSVKGRFTISADTSKNTAYLQMNSLRAEDTAVYYCARFVFFLPYAMDYWGQGTLVTVSSASTKGPSVFPLAPSSKSTSGGTAALGCLVKDYFPEPVTVSWNSGALTSGVHTFPAVLQSSGLYSLSSVVTVPSSSLGTQTYICNVNHKPSNTKVDKKVEPKSCDKTH

SEQ ID NO: 489 - protein, 11 aa, Artificial
  YADS1 CDR-L1
RASQASYSSVA

SEQ ID NO: 490 - protein, 7 aa, Artificial
  YADS1 CDR-L2
AASYLYS

SEQ ID NO: 491 - protein, 8 aa, Artificial
  YADS1 CDR-L3
QSSASPAT

SEQ ID NO: 492 - protein, 213 aa, Artificial; identical to SEQ ID NO: 19
  YADS1 LC

SEQ ID NO: 493 - protein, 11 aa, Artificial
  YADS2 CDR-L1
RASQSYAYAVA

SEQ ID NO: 494 - protein, 7 aa, Artificial
  YADS2 CDR-L2
DASYLYS

SEQ ID NO: 495 - protein, 9 aa, Artificial
  YADS2 CDR-L3
QQAYSSPDT

SEQ ID NO: 496 - protein, 214 aa, Artificial; identical to SEQ ID NO: 21
  YADS2 LC

SEQ ID NO: 497 - protein, 11 aa, Artificial
  YADS3 CDR-L1
RASQASYYDVA

SEQ ID NO: 498 - protein, 7 aa, Artificial
  YADS3 CDR-L2
AASYLYS

SEQ ID NO: 499 - protein, 9 aa, Artificial
  YADS3 CDR-L3
QQYYYAPAT

SEQ ID NO: 500 - protein, 214 aa, Artificial; identical to SEQ ID NO: 23
  YADS3 LC

SEQ ID NO: 501 - protein, 10 aa, Artificial
  YADS1 CDR -H1
GFDIYDDDIH

SEQ ID NO: 502 - protein, 17 aa, Artificial
  YADS1 CDR-H2
YIAPSYGYTDYADSVKG

SEQ ID NO: 503 - protein, 13 aa, Artificial
  YADS1 CDR-H3
SSDASYSYSAMDY

SEQ ID NO: 504 - protein, 252 aa, Artificial; identical to SEQ ID NO: 20
  YADS1 HC

SEQ ID NO: 505 - protein, 10 aa, Artificial
  YADS2 CDR -H1
GFAISDYDIH

SEQ ID NO: 506 - protein, 17 aa, Artificial
  YADS2 CDR-H2
DIAPYAGATAYADSVKG

SEQ ID NO: 507 - protein, 11 aa, Artificial
  YADS2 CDR-H3
SSYAYYAAMDY

SEQ ID NO: 508 - protein, 250 aa, Artificial; identical to SEQ ID NO: 22
  YADS2 HC

SEQ ID NO: 509 - protein, 10 aa, Artificial
  YADS3 CDR -H1
GFSISDYDIH

SEQ ID NO: 510 - protein, 17 aa, Artificial
  YADS3 CDR-H2
AIAPYSGSTYYADSVKG

SEQ ID NO: 511 - protein, 11 aa, Artificial
  YADS3 CDR-H3
SSYAYYSAMDY

SEQ ID NO: 512 - protein, 250 aa, Artificial; identical to SEQ ID NO: 24
  YADS3 HC

SEQ ID NO: 513 - protein, 10 aa, Artificial
  YADS4 CDR-H1
GFDIYDYAIH

SEQ ID NO: 514 - protein, 17 aa, Artificial
  YADS4 CDR-H2
SIAPYAGSTYYADSVKG

SEQ ID NO: 515 - protein, 11 aa, Artificial
  YADS4 CDR-H3
DSYAYYAAMDY

SEQ ID NO: 516 - protein, 250 aa, Artificial; identical to SEQ ID NO: 308
  YADS4 HC

SEQ ID NO: 517 - protein, 10 aa, Artificial
  YADS5 CDR -H1
GFSIAYYDIH

SEQ ID NO: 518 - protein, 17 aa, Artificial
  YADS5 CDR-H2
SIAPYAGATDYADSVKG

SEQ ID NO: 519 - protein, 11 aa, Artificial
  YADS5 CDR-H3
SSYAYASAMDY

SEQ ID NO: 520 - protein, 250 aa, Artificial; identical to SEQ ID NO: 304
  YADS5 HC

SEQ ID NO: 521 - protein, 10 aa, Artificial
  YADS6 CDR -H1
GFAIAYDDIH

SEQ ID NO: 522 - protein, 17 aa, Artificial
  YADS6 CDR-H2
SIAPYAGATAYADSVKG

SEQ ID NO: 523 - protein, 11 aa, Artificial
  YADS6 CDR-H3
AAAYAAYAMDY

SEQ ID NO: 524 - protein, 250 aa, Artificial; identical to SEQ ID NO: 324
  YADS6 HC

SEQ ID NO: 525 - protein, 10 aa, Artificial
  YADS7 CDR -H1
GFAIDYYDIH

SEQ ID NO: 526 - protein, 17 aa, Artificial
  YADS7 CDR-H2
SIAPYAGSTYYADSVKG

SEQ ID NO: 527 - protein, 11 aa, Artificial
  YADS7 CDR-H3
SAAYYAYAMDY

SEQ ID NO: 528 - protein, 250 aa, Artificial; identical to SEQ ID NO: 320
  YADS7 HC

SEQ ID NO: 529 - protein, 10 aa, Artificial
  YADS8 CDR -H1
GFAIAAYDIH

SEQ ID NO: 530 - protein, 17 aa, Artificial
  YADS8 CDR-H2
SISPYAGATSYADSVKG

SEQ ID NO: 531 - protein, 11 aa, Artificial
  YADS8 CDR-H3
AAAYYYDAMDY

SEQ ID NO: 532 - protein, 250 aa, Artificial; identical to SEQ ID NO: 328
  YADS8 HC

SEQ ID NO: 533 - protein, 10 aa, Artificial
  YADS9 CDR -H1
GFDISAYAIH

SEQ ID NO: 534 - protein, 17 aa, Artificial
  YADS9 CDR-H2
YISPSSGATAYADSVKG

SEQ ID NO: 535 - protein, 11 aa, Artificial
  YADS9 CDR-H3
SAYYSYAAMDY

SEQ ID NO: 536 - protein, 250 aa, Artificial; identical to SEQ ID NO: 350
  YADS9 HC

SEQ ID NO: 537 - protein, 10 aa, Artificial
  YADS10 CDR -H1
GFDIYDYSIH

SEQ ID NO: 538 - protein, 17 aa, Artificial
  YADS10 CDR-H2
YISPYSGATAYADSVKG

SEQ ID NO: 539 - protein, 11 aa, Artificial
  YADS10 CDR-H3
SSYAYYDAMDY

SEQ ID NO: 540 - protein, 250 aa, Artificial; identical to SEQ ID NO: 340
  YADS10 HC

SEQ ID NO: 541 - protein, 10 aa, Artificial
  YADS11 CDR -H1
GFDISASDIH

SEQ ID NO: 542 - protein, 17 aa, Artificial
  YADS11 CDR-H2
SISPYAGYTAYADSVKG

SEQ ID NO: 543 - protein, 11 aa, Artificial
  YADS11 CDR-H3
SAYYAASAMDY

SEQ ID NO: 544 - protein, 250 aa, Artificial; identical to SEQ ID NO: 312
  YADS11 HC

SEQ ID NO: 545 - protein, 10 aa, Artificial
  YADS12 CDR -H1
GFDIAYYDIH

SEQ ID NO: 546 - protein, 17 aa, Artificial
  YADS12 CDR-H2
SIAPYAGSTAYADSVKG

SEQ ID NO: 547 - protein, 11 aa, Artificial
  YADS12 CDR-H3
AAAAYAYAMDY

SEQ ID NO: 548 - protein, 250 aa, Artificial; identical to SEQ ID NO: 316
  YADS12 HC

SEQ ID NO: 549 - protein, 10 aa, Artificial
  YADS13 CDR -H1
GFSIDYYAIH

SEQ ID NO: 550 - protein, 17 aa, Artificial
  YADS13 CDR-H2
SIAPYAGYTYYADSVKG

SEQ ID NO: 551 - protein, 11 aa, Artificial
  YADS13 CDR-H3
AAAYYYDAMDY

SEQ ID NO: 552 - protein, 250 aa, Artificial; identical to SEQ ID NO: 300
  YADS13 HC

SEQ ID NO: 553 - protein, 10 aa, Artificial
  YADS14 CDR -H1
GFDISYYDIH

SEQ ID NO: 554 - protein, 17 aa, Artificial
  YADS14 CDR-H2
SIAPYAGATYYADSVKG

SEQ ID NO: 555 - protein, 11 aa, Artificial
  YADS14 CDR-H3
AADYAYDAMDY

SEQ ID NO: 556 - protein, 250 aa, Artificial; identical to SEQ ID NO: 276
  YADS14 HC

SEQ ID NO: 557 - protein, 10 aa, Artificial
  YADS15 CDR -H1
GFAIAAYAIH

SEQ ID NO: 558 - protein, 17 aa, Artificial
  YADS15 CDR-H2
DIYPAAGDTAYADSVKG

SEQ ID NO: 559 - protein, 13 aa, Artificial
  YADS15 CDR-H3
SYYYSYSSYAMDY

SEQ ID NO: 560 - protein, 252 aa, Artificial; identical to SEQ ID NO: 344
  YADS15 HC

SEQ ID NO: 561 - protein, 9 aa, Artificial
  YS1 Light chain CDR3
QQSYYSPYT

SEQ ID NO: 562 - protein, 9 aa, Artificial
  YS1 Heavy Chain CDR1
GFSISSSSI

SEQ ID NO: 563 - protein, 17 aa, Artificial
  YS1 Heavy chain CDR2
YISPSSGSTSYADSVKG

SEQ ID NO: 564 - protein, 12 aa, Artificial
  YS1 Heavy chain CDR3
YYSSSYYYSYYY

SEQ ID NO: 565 - protein, 214 aa, Artificial
  YS2 Fab light chain
DIQMTQSPSSLSASVGDRVTITCRASQSYAYAVAWYQQKPGKAPKLLIYDASYLYSGVPSRFSGSGSGTDFTLTISSLQPEDFATYYCQQSSYSPYTFGQGTKVEIKRTVAAPSVFIFPPSDEQLKSGTASVVCLLNNFYPREAKVQWKVDNALQSGNSQESVTEQDSKDSTYSLSSTLTLSKADYEKHKVYACEVTHQGLSSPVTKSFNRGEC

SEQ ID NO: 566 - protein, 8 aa, Artificial
  YS2 Heavy chain CDR1
GFSYYSSI

SEQ ID NO: 567 - protein, 12 aa, Artificial
  YS2 Heavy Chain CDR3
YYSSSSYYSYYY

SEQ ID NO: 568 - protein, 232 aa, Artificial
  YS2 Fab heavy chain
EVQLVESGGGLVQPGGSLRLSCAASGFSYYSSSIHWVRQAPGKGLEWVAYISPSSGSTSYADSVKGRFTISADTSKNTAYLQMNSLRAEDTAVYYCSRYYSSSSYYSYYYAMDYWGQGTLVTVSSASTKGPSVFPLAPSSKSTSGGTAALGCLVKDYFPEPVTVSWNSGALTSGVHTFPAVLQSSGLYSLSSVVTVPSSSLGTQTYICNVNHKPSNTKVDKKVEPKSCDKTH

SEQ ID NO: 569 - protein, 9 aa, Artificial
  YS3 CDR3 light chain
QQSYYSPYT

SEQ ID NO: 570 - protein, 214 aa, Artificial; identical to SEQ ID NO: 42
  YS3 Fab light chain

SEQ ID NO: 571 - protein, 9 aa, Artificial
  YS3 CDR1 heavy chain
GFSSYSSSI

SEQ ID NO: 572 - protein, 16 aa, Artificial
  YS3 CDR2 heavy chain
YYSSSYSSSSSADSVK

SEQ ID NO: 573 - protein, 15 aa, Artificial
  CDR-H3
YSSYSSSSYYSSYYY

SEQ ID NO: 574 - protein, 234 aa, Artificial
  YS3 Fab heavy chain
EVQLVESGGGLVQPGGSLRLSCAASGFSSYSSSIHWVRQAPGKGLEWVAYYSSSYSSSSADSVKGRFTISADTSKNTAYLQMNSLRAEDTAVYYCSRYSSYSSSSYYSSYYYAMDYWGQGTLVTVSSASTKGPSVFPLAPSSKSTSGGTAALGCLVKDYFPEPVTVSWNSGALTSGVHTFPAVLQSSGLYSLSSVVTVPSSSLGTQTYICNVNHKPSNTKVDKKVEPKSCDKTH

SEQ ID NO: 575 - protein, 15 aa, Artificial
  YS4 CDR3 heavy chain
YYYSYYSSSYSSYYY

SEQ ID NO: 576 - protein, 235 aa, Artificial
  YS4 Fab heavy chain
EVQLVESGGGLVQPGGSLRLSCAASGFSSSSSSIHWVRQAPGKGLEWVAYYSSYSSSSSSADSVKGRFTISADTSKNTAYLQMNSLRAEDTAVYYCSRYYYSYYSSSYSSYYYAMDYWGQGTLVTVSSASTKGPSVFPLAPSSKSTSGGTAALGCLVKDYFPEPVTVSWNSGALTSGVHTFPAVLQSSGLYSLSSVVTVPSSSLGTQTYICNVNHKPSNTKVDKKVEPKSCDKTH

SEQ ID NO: 577 - protein, 9 aa, Artificial
  YS5 CDR3 light chain
QQSSYYPST

SEQ ID NO: 578 - protein, 214 aa, Artificial
  YS5 Fab light chain
DIQMTQSPSSLSASVGDRVTITCRASQSYAYAVAWYQQKPGKAPKLLIYDASYLYSGVPSRFSGSGSGTDFTLTISSLQPEDFATYYCQQSSYYPSTFGQGTKVEIKRTVAAPSVFIFPPSDEQLKSGTASVVCLLNNFYPREAKVQWKVDNALQSGNSQESVTEQDSKDSTYSLSSTLTLSKADYEKHKVYACEVTHQGLSSPVTKSFNRGEC

SEQ ID NO: 579 - protein, 15 aa, Artificial
  YS5 CDR3 heavy chain
YSSYSSSYSSYSYYY

SEQ ID NO: 580 - protein, 235 aa, Artificial
  YS5 Fab heavy chain
EVQLVESGGGLVQPGGSLRLSCAASGFSSSSSSIHWVRQAPGKGLEWVAYYSSSYSSSSSADSVKGRFTISADTSKNTAYLQMNSLRAEDTAVYYCSRYSSYSSSYSSYSYYYAMDYWGQGTLVTVSSASTKGPSVFPLAPSSKSTSGGTAALGCLVKDYFPEPVTVSWNSGALTSGVHTFPAVLQSSGLYSLSSVVTVPSSSLGTQTYICNVNHKPSNTKVDKKVEPKSCDKTH

SEQ ID NO: 581 - protein, 15 aa, Artificial
  YS6 CDR3 heavy chain
YSSYSSYSSSYSYYY

SEQ ID NO: 582 - protein, 235 aa, Artificial
  YS6 Fab heavy chain
EVQLVESGGGLVQPGGSLRLSCAASGFSISYSSIHWVRQAPGKGLEWVAYISPSSGSTSYADSVKGRFTISADTSKNTAYLQMNSLRAEDTAVYYCSRYSSYSSYSSSYSYYYAMDYWGQGTLVTVSSASTKGPSVFPLAPSSKSTSGGTAALGCLVKDYFPEPVTVSWNSGALTSGVHTFPAVLQSSGLYSLSSVVTVPSSSLGTQTYICNVNHKPSNTKVDKKVEPKSCDKTH

SEQ ID NO: 583 - protein, 9 aa, Artificial
  YS6 CDR3 light chain
QQSYYSPYT

SEQ ID NO: 584 - protein, 214 aa, Artificial; identical to SEQ ID NO: 42
  YS6 Fab light chain

SEQ ID NO: 585 - protein, 17 aa, Artificial
  YS7 CDR2 heavy chain
YISPYSGYTSYADSVKG

SEQ ID NO: 586 - protein, 9 aa, Artificial
  YS7 CDR3 light chain
QQSSYSPYT

SEQ ID NO: 587 - protein, 214 aa, Artificial; identical to SEQ ID NO: 565
  YS7 Fab light chain

SEQ ID NO: 588 - protein, 15 aa, Artificial
  YS7 CDR3 heavy chain
YSYSYSSSSSSSYYY

SEQ ID NO: 589 - protein, 235 aa, Artificial
  YS7 Fab heavy chain
EVQLVESGGGLVQPGGSLRLSCAASGFSISSSSIHWVRQAPGKGLEWVAYISPYSGYTSYADSVKGRFTISADTSKNTAYLQMNSLRAEDTAVYYCSRYSYSYSSSSSSSYYYAMDYWGQGTLVTVSSASTKGPSVFPLAPSSKSTSGGTAALGCLVKDYFPEPVTVSWNSGALTSGVHTFPAVLQSSGLYSLSSVVTVPSSSLGTQTYICNVNHKPSNTKVDKKVEPKSCDKTH

SEQ ID NO: 590 - protein, 17 aa, Artificial
  YS8 CDR2 heavy chain
YISPSSGYTSYADSVKG

SEQ ID NO: 591 - protein, 15 aa, Artificial
  YS8 CDR3 heavy chain
YYSSYSSYSSYSYYY

SEQ ID NO: 592 - protein, 235 aa, Artificial
  YS8 Fab heavy chain
EVQLVESGGGLVQPGGSLRLSCAASGFSISSSSIHWVRQAPGKGLEWVAYISPSSGYTSYADSVKGRFTISADTSKNTAYLQMNSLRAEDTAVYYCSRYYSSYSSYSSYSYYYAMDYWGQGTLVTVSSASTKGPSVFPLAPSSKSTSGGTAALGCLVKDYFPEPVTVSWNSGALTSGVHTFPAVLQSSGLYSLSSVVTVPSSSLGTQTYICNVNHKPSNTKVDKKVEPKSCDKTH

SEQ ID NO: 593 - protein, 14 aa, Artificial
  YS9  CDR3 heavy chain
YYSSYSYYSSSYYY

SEQ ID NO: 594 - protein, 234 aa, Artificial
  YS9 Fab heavy chain
EVQLVESGGGLVQPGGSLRLSCAASGFSISYSSIHWVRQAPGKGLEWVAYISPYSGSTSYADSVKGRFTISADTSKNTAYLQMNSLRAEDTAVYYCSRYYSSYSYYSSSYYYAMDYWGQGTLVTVSSASTKGPSVFPLAPSSKSTSGGTAALGCLVKDYFPEPVTVSWNSGALTSGVHTFPAVLQSSGLYSLSSVVTVPSSSLGTQTYICNVNHKPSNTKVDKKVEPKSCDKTH

SEQ ID NO: 595 - protein, 9 aa, Artificial
  YS10 CDR-H3
QQSYSSPYI

SEQ ID NO: 596 - protein, 14 aa, Artificial
  YS10 CDR3 heavy chain
YSSYSYSSSYSYYY

SEQ ID NO: 597 - protein, 234 aa, Artificial
  YS10 Fab heavy chain
EVQLVESGGGLVQPGGSLRLSCAASGFSISSSSIHWVRQAPGKGLEWVAYISPSSGSTSYADSVKGRFTISADTSKNTAYLQMNSLRAEDTAVYYCSRYSSYSYSSSYSYYYAMDYWGQGTLVTVSSASTKGPSVFPLAPSSKSTSGGTAALGCLVKDYFPEPVTVSWNSGALTSGVHTFPAVLQSSGLYSLSSVVTVPSSSLGTQTYICNVNHKPSNTKVDKKVEPKSCDKTH

SEQ ID NO: 598 - protein, 214 aa, Artificial
  YS10 Fab light chain
DIQMTQSPSSLSASVGDRVTITCRASQSYAYAVAWYQQKPGKAPKLLIYDASYLYSGVPSRFSGSGSGTDFTLTISSLQPEDFATYYCQQSYSSPYTFGQGTKVEIKRTVAAPSVFIFPPSDEQLKSGTASVVCLLNNFYPREAKVQWKVDNALQSGNSQESVTEQDSKDSTYSLSSTLTLSKADYEKHKVYACEVTHQGLSSPVTKSFNRGEC

SEQ ID NO: 599 - protein, 14 aa, Artificial
  YS11 CDR3 heavy chain
YSSSSYSSYSSYYY

SEQ ID NO: 600 - protein, 234 aa, Artificial
  YS11 Fab heavy chain
EVQLVESGGGLVQPGGSLRLSCAASGFSISSSSIHWVRQAPGKGLEWVAYISPSSGYTSYADSVKGRFTISADTSKNTAYLQMNSLRAEDTAVYYCSRYSSSSYSSYSSYYYAMDYWGQGTLVTVSSASTKGPSVFPLAPSSKSTSGGTAALGCLVKDYFPEPVTVSWNSGALTSGVHTFPAVLQSSGLYSLSSVVTVPSSSLGTQTYICNVNHKPSNTKVDKKVEPKSCDKTH

SEQ ID NO: 601 - protein, 9 aa, Artificial
  YS12 CDR1 heavy chain
GFYISSSSI

SEQ ID NO: 602 - protein, 14 aa, Artificial
  YS12 CDR3 heavy chain
YSSSSSYYSSSYYY

SEQ ID NO: 603 - protein, 234 aa, Artificial
  YS12 Fab heavy chain
EVQLVESGGGLVQPGGSLRLSCAASGFYISSSSIHWVRQAPGKGLEWVAYISPSSGSTSYADSVKGRFTISADTSKNTAYLQMNSLRAEDTAVYYCSRYSSSSSYYSSSYYYAMDYWGQGTLVTVSSASTKGPSVFPLAPSSKSTSGGTAALGCLVKDYFPEPVTVSWNSGALTSGVHTFPAVLQSSGLYSLSSVVTVPSSSLGTQTYICNVNHKPSNTKVDKKVEPKSCDKTH

SEQ ID NO: 604 - protein, 14 aa, Artificial
  YS13 CDR3 heavy chain
YSYSSSSYYYSYYY

SEQ ID NO: 605 - protein, 234 aa, Artificial
  YS13 Fab heavy chain
EVQLVESGGGLVQPGGSLRLSCAASGFSISSSSIHWVRQAPGKGLEWVAYISPSSGSTSYADSVKGRFTISADTSKNTAYLQMNSLRAEDTAVYYCSRYSYSSSSYYYSYYYAMDYWGQGTLVTVSSASTKGPSVFPLAPSSKSTSGGTAALGCLVKDYFPEPVTVSWNSGALTSGVHTFPAVLQSSGLYSLSSVVTVPSSSLGTQTYICNVNHKPSNTKVDKKVEPKSCDKTH

SEQ ID NO: 606 - protein, 14 aa, Artificial
  YS14 CDR3 heavy chain
YSSSSYSSYYSYYY

SEQ ID NO: 607 - protein, 234 aa, Artificial
  YS14 Fab heavy chain
EVQLVESGGGLVQPGGSLRLSCAASGFSISSSSIHWVRQAPGKGLEWVAYISPYSGSTSYADSVKGRFTISADTSKNTAYLQMNSLRAEDTAVYYCSRYSSSSYSSYYSYYYAMDYWGQGTLVTVSSASTKGPSVFPLAPSSKSTSGGTAALGCLVKDYFPEPVTVSWNSGALTSGVHTFPAVLQSSGLYSLSSVVTVPSSSLGTQTYICNVNHKPSNTKVDKKVEPKSCDKTH

SEQ ID NO: 608 - protein, 9 aa, Artificial
  YS15 CDR3 light chain
QQSYSYPST

SEQ ID NO: 609 - protein, 214 aa, Artificial
  YS15 Fab light chain
DIQMTQSPSSLSASVGDRVTITCRASQSYAYAVAWYQQKPGKAPKLLIYDASYLYSGVPSRFSGSGSGTDFTLTISSLQPEDFATYYCQQSYSYPSTFGQGTKVEIKRTVAAPSVFIFPPSDEQLKSGTASVVCLLNNFYPREAKVQWKVDNALQSGNSQESVTEQDSKDSTYSLSSTLTLSKADYEKHKVYACEVTHQGLSSPVTKSFNRGEC

SEQ ID NO: 610 - protein, 17 aa, Artificial
  YS15 CDR2 heavy chain
YISPYSGSTYYADSVKG

SEQ ID NO: 611 - protein, 14 aa, Artificial
  YS15 CDR3 heavy chain
YSSYSYSSSYSYYY

SEQ ID NO: 612 - protein, 234 aa, Artificial
  YS15 Fab heavy chain
EVQLVESGGGLVQPGGSLRLSCAASGFSISSSSIHWVRQAPGKGLEWVAYISPYSGSTYYADSVKGRFTISADTSKNTAYLQMNSLRAEDTAVYYCSRYSSYSYSSSYSYYYAMDYWGQGTLVTVSSASTKGPSVFPLAPSSKSTSGGTAALGCLVKDYFPEPVTVSWNSGALTSGVHTFPAVLQSSGLYSLSSVVTVPSSSLGTQTYICNVNHKPSNTKVDKKVEPKSCDKTH

SEQ ID NO: 613 - protein, 14 aa, Artificial
  YS16 CDR3 heavy chain
YSYYSYSSYSSYYY

SEQ ID NO: 614 - protein, 234 aa, Artificial
  YS16 Fab heavy chain
EVQLVESGGGLVQPGGSLRLSCAASGFSISSSSIHWVRQAPGKGLEWVAYISPYSGSTYYADSVKGRFTISADTSKNTAYLQMNSLRAEDTAVYYCSRYSYYSYSSYSSYYYAMDYWGQGTLVTVSSASTKGPSVFPLAPSSKSTSGGTAALGCLVKDYFPEPVTVSWNSGALTSGVHTFPAVLQSSGLYSLSSVVTVPSSSLGTQTYICNVNHKPSNTKVDKKVEPKSCDKTH

SEQ ID NO: 615 - protein, 9 aa, Artificial
  YS17 CDR3 light chain
QQSYYYPST

SEQ ID NO: 616 - protein, 214 aa, Artificial
  YS17 Fab light chain
DIQMTQSPSSLSASVGDRVTITCRASQSYAYAVAWYQQKPGKAPKLLIYDASYLYSGVPSRFSGSGSGTDFTLTISSLQPEDFATYYCQQSYYYPSTFGQGTKVEIKRTVAAPSVFIFPPSDEQLKSGTASVVCLLNNFYPREAKVQWKVDNALQSGNSQESVTEQDSKDSTYSLSSTLTLSKADYEKHKVYACEVTHQGLSSPVTKSFNRGEC

SEQ ID NO: 617 - protein, 17 aa, Artificial
  YS17 CDR2 heavy chain
SISPYYGYTSYADSVKG

SEQ ID NO: 618 - protein, 14 aa, Artificial
  YS17 CDR3 heavy chain
YSSYSSYSSYSYYY

SEQ ID NO: 619 - protein, 234 aa, Artificial
  YS17 Fab heavy chain
EVQLVESGGGLVQPGGSLRLSCAASGFSISSSSIHWVRQAPGKGLEWVASISPYYGYTSYADSVKGRFTISADTSKNTAYLQMNSLRAEDTAVYYCSRYSSYSSYSSYSYYYAMDYWGQGTLVTVSSASTKGPSVFPLAPSSKSTSGGTAALGCLVKDYFPEPVTVSWNSGALTSGVHTFPAVLQSSGLYSLSSVVTVPSSSLGTQTYICNVNHKPSNTKVDKKVEPKSCDKTH

SEQ ID NO: 620 - protein, 9 aa, Artificial
  YS18 CDR1 heavy chain
GFSIYSSSI

SEQ ID NO: 621 - protein, 14 aa, Artificial
  YS18 CDR3 heavy chain
YSYSSSSSYSSYYY

SEQ ID NO: 622 - protein, 234 aa, Artificial
  YS18 Fab heavy chain
EVQLVESGGGLVQPGGSLRLSCAASGFSIYSSSIHWVRQAPGKGLEWVAYISPYSGSTSYADSVKGRFTISADTSKNTAYLQMNSLRAEDTAVYYCSRYSYSSSSSYSSYYYAMDYWGQGTLVTVSSASTKGPSVFPLAPSSKSTSGGTAALGCLVKDYFPEPVTVSWNSGALTSGVHTFPAVLQSSGLYSLSSVVTVPSSSLGTQTYICNVNHKPSNTKVDKKVEPKSCDKTH

SEQ ID NO: 623 - protein, 14 aa, Artificial
  YS19 CDR3 heavy chain
YSSSYYSSYSSYYY

SEQ ID NO: 624 - protein, 234 aa, Artificial
  YS19 Fab heavy chain
EVQLVESGGGLVQPGGSLRLSCAASGFSISSSSIHWVRQAPGKGLEWVAYISPYSGYTSYADSVKGRFTISADTSKNTAYLQMNSLRAEDTAVYYCSRYSSSYYSSYSSYYYAMDYWGQGTLVTVSSASTKGPSVFPLAPSSKSTSGGTAALGCLVKDYFPEPVTVSWNSGALTSGVHTFPAVLQSSGLYSLSSVVTVPSSSLGTQTYICNVNHKPSNTKVDKKVEPKSCDKTH

SEQ ID NO: 625 - protein, 14 aa, Artificial
  YS20 CDR3 heavy chain
YSYSSSSSYSSYYY

SEQ ID NO: 626 - protein, 234 aa, Artificial
  YS20 Fab heavy chain
EVQLVESGGGLVQPGGSLRLSCAASGFSISSSSIHWVRQAPGKGLEWVAYISPYSGSTSYADSVKGRFTISADTSKNTAYLQMNSLRAEDTAVYYCSRYSYSSSSSYSSYYYAMDYWGQGTLVTVSSASTKGPSVFPLAPSSKSTSGGTAALGCLVKDYFPEPVTVSWNSGALTSGVHTFPAVLQSSGLYSLSSVVTVPSSSLGTQTYICNVNHKPSNTKVDKKVEPKSCDKTH

SEQ ID NO: 627 - protein, 17 aa, Artificial
  YS21 CDR2 heavy chain
YISPSSGSTSYADSVKG

SEQ ID NO: 628 - protein, 14 aa, Artificial
  YS21 CDR3 heavy chain
YSYYSYSSYYSYYY

SEQ ID NO: 629 - protein, 234 aa, Artificial
  YS21 Fab heavy chain
EVQLVESGGGLVQPGGSLRLSCAASGFYISSSSIHWVRQAPGKGLEWVAYISPSSGSTSYADSVKGRFTISADTSKNTAYLQMNSLRAEDTAVYYCSRYSYYSYSSYYSYYYAMDYWGQGTLVTVSSASTKGPSVFPLAPSSKSTSGGTAALGCLVKDYFPEPVTVSWNSGALTSGVHTFPAVLQSSGLYSLSSVVTVPSSSLGTQTYICNVNHKPSNTKVDKKVEPKSCDKTH

SEQ ID NO: 630 - protein, 9 aa, Artificial
  YS22 CDR3 light chain
QQSSSSPYT

SEQ ID NO: 631 - protein, 214 aa, Artificial
  YS22 Fab light chain
DIQMTQSPSSLSASVGDRVTITCRASQSYAYAVAWYQQKPGKAPKLLIYDASYLYSGVPSRFSGSGSGTDFTLTISSLQPEDFATYYCQQSSSSPYTFGQGTKVEIKRTVAAPSVFIFPPSDEQLKSGTASVVCLLNNFYPREAKVQWKVDNALQSGNSQESVTEQDSKDSTYSLSSTLTLSKADYEKHKVYACEVTHQGLSSPVTKSFNRGEC

SEQ ID NO: 632 - protein, 14 aa, Artificial
  YS22 CDR3 heavy chain
YYSSSYSYSSSYYY

SEQ ID NO: 633 - protein, 234 aa, Artificial
  YS22 Fab heavy chain
EVQLVESGGGLVQPGGSLRLSCAASGFSIYSSSIHWVRQAPGKGLEWVAYISPYSGYTSYADSVKGRFTISADTSKNTAYLQMNSLRAEDTAVYYCSRYYSSSYSYSSSYYYAMDYWGQGTLVTVSSASTKGPSVFPLAPSSKSTSGGTAALGCLVKDYFPEPVTVSWNSGALTSGVHTFPAVLQSSGLYSLSSVVTVPSSSLGTQTYICNVNHKPSNTKVDKKVEPKSCDKTH

SEQ ID NO: 634 - protein, 14 aa, Artificial
  YS23 CDR3 heavy chain
YYYSYYSSSYSYYY

SEQ ID NO: 635 - protein, 234 aa, Artificial
  YS23 Fab heavy chain
EVQLVESGGGLVQPGGSLRLSCAASGFSISSSSIHWVRQAPGKGLEWVAYISPYSGYTSYADSVKGRFTISADTSKNTAYLQMNSLRAEDTAVYYCSRYYYSYYSSSYSYYYAMDYWGQGTLVTVSSASTKGPSVFPLAPSSKSTSGGTAALGCLVKDYFPEPVTVSWNSGALTSGVHTFPAVLQSSGLYSLSSVVTVPSSSLGTQTYICNVNHKPSNTKVDKKVEPKSCDKTH

SEQ ID NO: 636 - protein, 14 aa, Artificial
  YS24 CDR3 heavy chain
YYSYSSYSSSSYYY

SEQ ID NO: 637 - protein, 234 aa, Artificial
  YS24 Fab heavy chain
EVQLVESGGGLVQPGGSLRLSCAASGFSISSSSIHWVRQAPGKGLEWVAYISPSSGSTSYADSVKGRFTISADTSKNTAYLQMNSLRAEDTAVYYCSRYYSYSSYSSSSYYYAMDYWGQGTLVTVSSASTKGPSVFPLAPSSKSTSGGTAALGCLVKDYFPEPVTVSWNSGALTSGVHTFPAVLQSSGLYSLSSVVTVPSSSLGTQTYICNVNHKPSNTKVDKKVEPKSCDKTH

SEQ ID NO: 638 - protein, 14 aa, Artificial
  YS25 CDR3 heavy chain
YYSSSYSSYSSYYY

SEQ ID NO: 639 - protein, 234 aa, Artificial
  YS25 Fab heavy chain
EVQLVESGGGLVQPGGSLRLSCAASGFSIYYSSIHWVRQAPGKGLEWVAYISPSSGSTSYADSVKGRFTISADTSKNTAYLQMNSLRAEDTAVYYCSRYYSSSYSSYSSYYYAMDYWGQGTLVTVSSASTKGPSVFPLAPSSKSTSGGTAALGCLVKDYFPEPVTVSWNSGALTSGVHTFPAVLQSSGLYSLSSVVTVPSSSLGTQTYICNVNHKPSNTKVDKKVEPKSCDKTH

SEQ ID NO: 640 - protein, 13 aa, Artificial
  YS26 CDR3 heavy chain
YSYSSSSSYSYYY

SEQ ID NO: 641 - protein, 233 aa, Artificial
  YS26 Fab heavy chain
EVQLVESGGGLVQPGGSLRLSCAASGFSISSSSIHWVRQAPGKGLEWVAYISPYSGSTSYADSVKGRFTISADTSKNTAYLQMNSLRAEDTAVYYCSRYSYSSSSSYSYYYAMDYWGQGTLVTVSSASTKGPSVFPLAPSSKSTSGGTAALGCLVKDYFPEPVTVSWNSGALTSGVHTFPAVLQSSGLYSLSSVVTVPSSSLGTQTYICNVNHKPSNTKVDKKVEPKSCDKTH

SEQ ID NO: 642 - protein, 17 aa, Artificial
  YS27 CDR2 heavy chain
SISPYSGYTSYADSVKG

SEQ ID NO: 643 - protein, 13 aa, Artificial
  YS27 CDR3 heavy chain
YSSSSYSYSSYYY

SEQ ID NO: 644 - protein, 233 aa, Artificial
  YS27 Fab heavy chain
EVQLVESGGGLVQPGGSLRLSCAASGFSIYYSSIHWVRQAPGKGLEWVASISPYSGYTSYADSVKGRFTISADTSKNTAYLQMNSLRAEDTAVYYCSRYSSSSYSYSSYYYAMDYWGQGTLVTVSSASTKGPSVFPLAPSSKSTSGGTAALGCLVKDYFPEPVTVSWNSGALTSGVHTFPAVLQSSGLYSLSSVVTVPSSSLGTQTYICNVNHKPSNTKVDKKVEPKSCDKTH

SEQ ID NO: 645 - protein, 17 aa, Artificial
  YS28 CDR2 heavy chain
YISPSYGSTSYADSVKG

SEQ ID NO: 646 - protein, 13 aa, Artificial
  YS28 CDR3 heavy chain
YYSSSYSYYSYYY

SEQ ID NO: 647 - protein, 233 aa, Artificial
  YS28 Fab heavy chain
EVQLVESGGGLVQPGGSLRLSCAASGFSISSSSIHWVRQAPGKGLEWVAYISPSYGSTSYADSVKGRFTISADTSKNTAYLQMNSLRAEDTAVYYCSRYYSSSYSYYSYYYAMDYWGQGTLVTVSSASTKGPSVFPLAPSSKSTSGGTAALGCLVKDYFPEPVTVSWNSGALTSGVHTFPAVLQSSGLYSLSSVVTVPSSSLGTQTYICNVNHKPSNTKVDKKVEPKSCDKTH

SEQ ID NO: 648 - protein, 13 aa, Artificial
  YS29 CDR3 heavy chain
YSSSSSSYYSYYY

SEQ ID NO: 649 - protein, 233 aa, Artificial
  YS29 Fab heavy chain
EVQLVESGGGLVQPGGSLRLSCAASGFSISSSSIHWVRQAPGKGLEWVAYISPYSGYTSYADSVKGRFTISADTSKNTAYLQMNSLRAEDTAVYYCSRYSSSSSSYYSYYYAMDYWGQGTLVTVSSASTKGPSVFPLAPSSKSTSGGTAALGCLVKDYFPEPVTVSWNSGALTSGVHTFPAVLQSSGLYSLSSVVTVPSSSLGTQTYICNVNHKPSNTKVDKKVEPKSCDKTH

SEQ ID NO: 650 - protein, 13 aa, Artificial
  YS30 CDR3 heavy chain
YSSSYYSSYSYYY

SEQ ID NO: 651 - protein, 233 aa, Artificial
  YS30 Fab heavy chain
EVQLVESGGGLVQPGGSLRLSCAASGFSISSSSIHWVRQAPGKGLEWVAYISPSSGSTSYADSVKGRFTISADTSKNTAYLQMNSLRAEDTAVYYCSRYSSSYYSSYSYYYAMDYWGQGTLVTVSSASTKGPSVFPLAPSSKSTSGGTAALGCLVKDYFPEPVTVSWNSGALTSGVHTFPAVLQSSGLYSLSSVVTVPSSSLGTQTYICNVNHKPSNTKVDKKVEPKSCDKTH

SEQ ID NO: 652 - protein, 13 aa, Artificial
  YS31 CDR3 heavy chain
YSSSSYSYSSYYY

SEQ ID NO: 653 - protein, 233 aa, Artificial
  YS31 Fab heavy chain
EVQLVESGGGLVQPGGSLRLSCAASGFSIYSSSIHWVRQAPGKGLEWVAYISPSSGSTSYADSVKGRFTISADTSKNTAYLQMNSLRAEDTAVYYCSRYSSSSYSYSSYYYAMDYWGQGTLVTVSSASTKGPSVFPLAPSSKSTSGGTAALGCLVKDYFPEPVTVSWNSGALTSGVHTFPAVLQSSGLYSLSSVVTVPSSSLGTQTYICNVNHKPSNTKVDKKVEPKSCDKTH

SEQ ID NO: 654 - protein, 13 aa, Artificial
  YS32 CDR3 heavy chain
YYSSSSSYYSYYY

SEQ ID NO: 655 - protein, 233 aa, Artificial
  YS32 Fab heavy chain
EVQLVESGGGLVQPGGSLRLSCAASGFSIYSSSIHWVRQAPGKGLEWVAYISPSSGSTSYADSVKGRFTISADTSKNTAYLQMNSLRAEDTAVYYCSRYYSSSSSYYSYYYAMDYWGQGTLVTVSSASTKGPSVFPLAPSSKSTSGGTAALGCLVKDYFPEPVTVSWNSGALTSGVHTFPAVLQSSGLYSLSSVVTVPSSSLGTQTYICNVNHKPSNTKVDKKVEPKSCDKTH

SEQ ID NO: 656 - protein, 13 aa, Artificial
  YS33 CDR3 heavy chain
YSSYSSSYSSYYY

SEQ ID NO: 657 - protein, 233 aa, Artificial
  YS33 Fab heavy chain
EVQLVESGGGLVQPGGSLRLSCAASGFYISSSSIHWVRQAPGKGLEWVAYISPSSGYTSYADSVKGRFTISADTSKNTAYLQMNSLRAEDTAVYYCSRYSSYSSSYSSYYYAMDYWGQGTLVTVSSASTKGPSVFPLAPSSKSTSGGTAALGCLVKDYFPEPVTVSWNSGALTSGVHTFPAVLQSSGLYSLSSVVTVPSSSLGTQTYICNVNHKPSNTKVDKKVEPKSCDKTH

SEQ ID NO: 658 - protein, 13 aa, Artificial
  YS34 CDR3 heavy chain
YSSSSYSSSSYYY

SEQ ID NO: 659 - protein, 233 aa, Artificial
  YS34 Fab heavy chain
EVQLVESGGGLVQPGGSLRLSCAASGFSISSSSIHWVRQAPGKGLEWVAYISPYSGSTSYADSVKGRFTISADTSKNTAYLQMNSLRAEDTAVYYCSRYSSSSYSSSSYYYAMDYWGQGTLVTVSSASTKGPSVFPLAPSSKSTSGGTAALGCLVKDYFPEPVTVSWNSGALTSGVHTFPAVLQSSGLYSLSSVVTVPSSSLGTQTYICNVNHKPSNTKVDKKVEPKSCDKTH

SEQ ID NO: 660 - protein, 13 aa, Artificial
  YS35 CDR3 heavy chain
YSSSSYSYSSYYY

SEQ ID NO: 661 - protein, 233 aa, Artificial
  YS35 Fab heavy chain
EVQLVESGGGLVQPGGSLRLSCAASGFSISSSSIHWVRQAPGKGLEWVAYISPSSGSTSYADSVKGRFTISADTSKNTAYLQMNSLRAEDTAVYYCSRYSSSSYSYSSYYYAMDYWGQGTLVTVSSASTKGPSVFPLAPSSKSTSGGTAALGCLVKDYFPEPVTVSWNSGALTSGVHTFPAVLQSSGLYSLSSVVTVPSSSLGTQTYICNVNHKPSNTKVDKKVEPKSCDKTH

SEQ ID NO: 662 - protein, 9 aa, Artificial
  YS36 CDR1 heavy chain
GFSIYSSSI

SEQ ID NO: 663 - protein, 13 aa, Artificial
  YS36 CDR3 heavy chain
YSSSSSSYSSYYY

SEQ ID NO: 664 - protein, 233 aa, Artificial
  YS36 Fab heavy chain
EVQLVESGGGLVQPGGSLRLSCAASGFSIYSSSIHWVRQAPGKGLEWVAYISPYSGSTYYADSVKGRFTISADTSKNTAYLQMNSLRAEDTAVYYCSRYSSSSSSYSSYYYAMDYWGQGTLVTVSSASTKGPSVFPLAPSSKSTSGGTAALGCLVKDYFPEPVTVSWNSGALTSGVHTFPAVLQSSGLYSLSSVVTVPSSSLGTQTYICNVNHKPSNTKVDKKVEPKSCDKTH

SEQ ID NO: 665 - protein, 13 aa, Artificial
  YS37 CDR3 heavy chain
YYSSSSSYSSYYY

SEQ ID NO: 666 - protein, 233 aa, Artificial
  YS37 Fab heavy chain
EVQLVESGGGLVQPGGSLRLSCAASGFSISSSSIHWVRQAPGKGLEWVAYISPYSGSTYYADSVKGRFTISADTSKNTAYLQMNSLRAEDTAVYYCSRYYSSSSSYSSYYYAMDYWGQGTLVTVSSASTKGPSVFPLAPSSKSTSGGTAALGCLVKDYFPEPVTVSWNSGALTSGVHTFPAVLQSSGLYSLSSVVTVPSSSLGTQTYICNVNHKPSNTKVDKKVEPKSCDKTH

SEQ ID NO: 667 - protein, 13 aa, Artificial
  YS38 CDR3 heavy chain
YSYSSYSSYSSYY

SEQ ID NO: 668 - protein, 233 aa, Artificial
  YS38 Fab heavy chain
EVQLVESGGGLVQPGGSLRLSCAASGFSIYSSSIHWVRQAPGKGLEWVAYISPSSGSTSYADSVKGRFTISADTSKNTAYLQMNSLRAEDTAVYYCSRYSYSSYSSYSSYYAMDYWGQGTLVTVSSASTKGPSVFPLAPSSKSTSGGTAALGCLVKDYFPEPVTVSWNSGALTSGVHTFPAVLQSSGLYSLSSVVTVPSSSLGTQTYICNVNHKPSNTKVDKKVEPKSCDKTH

SEQ ID NO: 669 - protein, 12 aa, Artificial
  YS39 CDR3 heavy chain
YYSSSYSYSYYY

SEQ ID NO: 670 - protein, 232 aa, Artificial
  YS39 Fab heavy chain
EVQLVESGGGLVQPGGSLRLSCAASGFSIYSSSIHWVRQAPGKGLEWVAYISPYSGSTSYADSVKGRFTISADTSKNTAYLQMNSLRAEDTAVYYCSRYYSSSYSYSYYYAMDYWGQGTLVTVSSASTKGPSVFPLAPSSKSTSGGTAALGCLVKDYFPEPVTVSWNSGALTSGVHTFPAVLQSSGLYSLSSVVTVPSSSLGTQTYICNVNHKPSNTKVDKKVEPKSCDKTH

SEQ ID NO: 671 - protein, 12 aa, Artificial
  YS40 CDR3 heavy chain
YYYSYSSYSYYY

SEQ ID NO: 672 - protein, 232 aa, Artificial
  YS40 Fab heavy chain
EVQLVESGGGLVQPGGSLRLSCAASGFSIYSSSIHWVRQAPGKGLEWVAYISPSSGSTSYADSVKGRFTISADTSKNTAYLQMNSLRAEDTAVYYCSRYYYSYSSYSYYYAMDYWGQGTLVTVSSASTKGPSVFPLAPSSKSTSGGTAALGCLVKDYFPEPVTVSWNSGALTSGVHTFPAVLQSSGLYSLSSVVTVPSSSLGTQTYICNVNHKPSNTKVDKKVEPKSCDKTH

SEQ ID NO: 673 - protein, 12 aa, Artificial
  YS41 CDR3 heavy chain
YSYSYSSYSYYY

SEQ ID NO: 674 - protein, 232 aa, Artificial
  YS41 Fab heavy chain
EVQLVESGGGLVQPGGSLRLSCAASGFSISSSSIHWVRQAPGKGLEWVAYISPSSGSTSYADSVKGRFTISADTSKNTAYLQMNSLRAEDTAVYYCSRYSYSYSSYSYYYAMDYWGQGTLVTVSSASTKGPSVFPLAPSSKSTSGGTAALGCLVKDYFPEPVTVSWNSGALTSGVHTFPAVLQSSGLYSLSSVVTVPSSSLGTQTYICNVNHKPSNTKVDKKVEPKSCDKTH

SEQ ID NO: 675 - protein, 12 aa, Artificial
  YS42 CDR3 heavy chain
YSSSSSYSSYYY

SEQ ID NO: 676 - protein, 232 aa, Artificial
  YS42 Fab heavy chain
EVQLVESGGGLVQPGGSLRLSCAASGFSISYSSIHWVRQAPGKGLEWVAYISPYSGSTSYADSVKGRFTISADTSKNTAYLQMNSLRAEDTAVYYCSRYSSSSSYSSYYYAMDYWGQGTLVTVSSASTKGPSVFPLAPSSKSTSGGTAALGCLVKDYFPEPVTVSWNSGALTSGVHTFPAVLQSSGLYSLSSVVTVPSSSLGTQTYICNVNHKPSNTKVDKKVEPKSCDKTH

SEQ ID NO: 677 - protein, 12 aa, Artificial
  YS43 CDR3 heavy chain
YSSSSYYYSYYY

SEQ ID NO: 678 - protein, 232 aa, Artificial
  YS43 Fab heavy chain
EVQLVESGGGLVQPGGSLRLSCAASGFSISSSSIHWVRQAPGKGLEWVAYISPYSGSTSYADSVKGRFTISADTSKNTAYLQMNSLRAEDTAVYYCSRYSSSSYYYSYYYAMDYWGQGTLVTVSSASTKGPSVFPLAPSSKSTSGGTAALGCLVKDYFPEPVTVSWNSGALTSGVHTFPAVLQSSGLYSLSSVVTVPSSSLGTQTYICNVNHKPSNTKVDKKVEPKSCDKTH

SEQ ID NO: 679 - protein, 12 aa, Artificial
  YS44 CDR3 heavy chain
YSSSSSYYSYYY

SEQ ID NO: 680 - protein, 232 aa, Artificial
  YS44 Fab heavy chain
EVQLVESGGGLVQPGGSLRLSCAASGFSIYSSSIHWVRQAPGKGLEWVAYISPSSGSTSYADSVKGRFTISADTSKNTAYLQMNSLRAEDTAVYYCSRYSSSSSYYSYYYAMDYWGQGTLVTVSSASTKGPSVFPLAPSSKSTSGGTAALGCLVKDYFPEPVTVSWNSGALTSGVHTFPAVLQSSGLYSLSSVVTVPSSSLGTQTYICNVNHKPSNTKVDKKVEPKSCDKTH

SEQ ID NO: 681 - protein, 12 aa, Artificial
  YS45 CDR3 heavy chain
YSSYSYYYSYYY

SEQ ID NO: 682 - protein, 232 aa, Artificial
  YS45 Fab heavy chain
EVQLVESGGGLVQPGGSLRLSCAASGFSISSSSIHWVRQAPGKGLEWVASISPYSGYTSYADSVKGRFTISADTSKNTAYLQMNSLRAEDTAVYYCSRYSSYSYYYSYYYAMDYWGQGTLVTVSSASTKGPSVFPLAPSSKSTSGGTAALGCLVKDYFPEPVTVSWNSGALTSGVHTFPAVLQSSGLYSLSSVVTVPSSSLGTQTYICNVNHKPSNTKVDKKVEPKSCDKTH

SEQ ID NO: 683 - protein, 12 aa, Artificial
  YS47 CDR3 heavy chain
YSSSSYSYSYYY

SEQ ID NO: 684 - protein, 232 aa, Artificial
  YS47 Fab heavy chain
EVQLVESGGGLVQPGGSLRLSCAASGFSIYSSSIHWVRQAPGKGLEWVAYISPSSGYTSYADSVKGRFTISADTSKNTAYLQMNSLRAEDTAVYYCSRYSSSSYSYSYYYAMDYWGQGTLVTVSSASTKGPSVFPLAPSSKSTSGGTAALGCLVKDYFPEPVTVSWNSGALTSGVHTFPAVLQSSGLYSLSSVVTVPSSSLGTQTYICNVNHKPSNTKVDKKVEPKSCDKTH

SEQ ID NO: 685 - protein, 12 aa, Artificial
  YS47 CDR3 heavy chain
YSSSYSSYSYYY

SEQ ID NO: 686 - protein, 232 aa, Artificial
  YS47 Fab heavy chain
EVQLVESGGGLVQPGGSLRLSCAASGFSISSSSIHWVRQAPGKGLEWVAYISPYSGSTSYADSVKGRFTISADTSKNTAYLQMNSLRAEDTAVYYCSRYSSSYSSYSYYYAMDYWGQGTLVTVSSASTKGPSVFPLAPSSKSTSGGTAALGCLVKDYFPEPVTVSWNSGALTSGVHTFPAVLQSSGLYSLSSVVTVPSSSLGTQTYICNVNHKPSNTKVDKKVEPKSCDKTH

SEQ ID NO: 687 - protein, 12 aa, Artificial
  YS48 CDR3 heavy chain
YSYSSSSSSYYY

SEQ ID NO: 688 - protein, 232 aa, Artificial
  YS48 Fab heavy chain
EVQLVESGGGLVQPGGSLRLSCAASGFSISSSSIHWVRQAPGKGLEWVAYISPYSGYTSYADSVKGRFTISADTSKNTAYLQMNSLRAEDTAVYYCSRYSYSSSSSSYYYAMDYWGQGTLVTVSSASTKGPSVFPLAPSSKSTSGGTAALGCLVKDYFPEPVTVSWNSGALTSGVHTFPAVLQSSGLYSLSSVVTVPSSSLGTQTYICNVNHKPSNTKVDKKVEPKSCDKTH

SEQ ID NO: 689 - protein, 12 aa, Artificial
  YS49 CDR3 heavy chain
YSSSYYYYSYSY

SEQ ID NO: 690 - protein, 232 aa, Artificial
  YS49 Fab heavy chain
EVQLVESGGGLVQPGGSLRLSCAASGFSIYSSSIHWVRQAPGKGLEWVAYISPYSGSTSYADSVKGRFTISADTSKNTAYLQMNSLRAEDTAVYYCSRYSSSYYYYSYSYAMDYWGQGTLVTVSSASTKGPSVFPLAPSSKSTSGGTAALGCLVKDYFPEPVTVSWNSGALTSGVHTFPAVLQSSGLYSLSSVVTVPSSSLGTQTYICNVNHKPSNTKVDKKVEPKSCDKTH

SEQ ID NO: 691 - protein, 11 aa, Artificial
  YS50 CDR3 heavy chain
YSSSYYYSYYY

SEQ ID NO: 692 - protein, 231 aa, Artificial
  YS50 Fab heavy chain
EVQLVESGGGLVQPGGSLRLSCAASGFSISSSSIHWVRQAPGKGLEWVAYISPSSGSTSYADSVKGRFTISADTSKNTAYLQMNSLRAEDTAVYYCSRYSSSYYYSYYYAMDYWGQGTLVTVSSASTKGPSVFPLAPSSKSTSGGTAALGCLVKDYFPEPVTVSWNSGALTSGVHTFPAVLQSSGLYSLSSVVTVPSSSLGTQTYICNVNHKPSNTKVDKKVEPKSCDKTH

SEQ ID NO: 693 - protein, 11 aa, Artificial
  YS51 CDR3 heavy chain
YSSSYSYSYYY

SEQ ID NO: 694 - protein, 231 aa, Artificial
  YS51 Fab heavy chain
EVQLVESGGGLVQPGGSLRLSCAASGFSISSSSIHWVRQAPGKGLEWVAYISPYSGSTSYADSVKGRFTISADTSKNTAYLQMNSLRAEDTAVYYCSRYSSSYSYSYYYAMDYWGQGTLVTVSSASTKGPSVFPLAPSSKSTSGGTAALGCLVKDYFPEPVTVSWNSGALTSGVHTFPAVLQSSGLYSLSSVVTVPSSSLGTQTYICNVNHKPSNTKVDKKVEPKSCDKTH

SEQ ID NO: 695 - protein, 9 aa, Artificial
  YS52 CDR1 heavy chain
GFSISSSYI

SEQ ID NO: 696 - protein, 17 aa, Artificial
  YS52 CDR2 heavy chain
SIYPYYGYTSYADSVKG

SEQ ID NO: 697 - protein, 8 aa, Artificial
  YS52 CDR3 heavy chain
SSSSSYYS

SEQ ID NO: 698 - protein, 228 aa, Artificial
  YS52 Fab heavy chain
EVQLVESGGGLVQPGGSLRLSCAASGFSISSSYIHWVRQAPGKGLEWVASIYPYYGYTSYADSVKGRFTISADTSKNTAYLQMNSLRAEDTAVYYCSRSSSSSYYSAMDYWGQGTLVTVSSASTKGPSVFPLAPSSKSTSGGTAALGCLVKDYFPEPVTVSWNSGALTSGVHTFPAVLQSSGLYSLSSVVTVPSSSLGTQTYICNVNHKPSNTKVDKKVEPKSCDKTH

SEQ ID NO: 699 - protein, 17 aa, Artificial
  YS53 CDRH2
SISPYSGYTYYADSVKG

SEQ ID NO: 700 - protein, 13 aa, Artificial
  YS53 CDRH3
SYYSSSYSSYYSS

SEQ ID NO: 701 - protein, 233 aa, Artificial
  YS53 Fab heavy chain
EVQLVESGGGLVQPGGSLRLSCAASGFYISSSSIHWVRQAPGKGLEWVASISPYSGYTYYADSVKGRFTISADTSKNTAYLQMNSLRAEDTAVYYCSRSYYSSSYSSYYSSAMDYWGQGTLVTVSSASTKGPSVFPLAPSSKSTSGGTAALGCLVKDYFPEPVTVSWNSGALTSGVHTFPAVLQSSGLYSLSSVVTVPSSSLGTQTYICNVNHKPSNTKVDKKVEPKSCDKTH

SEQ ID NO: 702 - protein, 17 aa, Artificial
  YS54 CDRH2
SISPSSGSTYYADSVKG

SEQ ID NO: 703 - protein, 233 aa, Artificial
  YS54 Fab heavy chain
EVQLVESGGGLVQPGGSLRLSCAASGFSISSSSIHWVRQAPGKGLEWVASISPSSGSTYYADSVKGRFTISADTSKNTAYLQMNSLRAEDTAVYYCSRSYYSSSYSSYYSSAMDYWGQGTLVTVSSASTKGPSVFPLAPSSKSTSGGTAALGCLVKDYFPEPVTVSWNSGALTSGVHTFPAVLQSSGLYSLSSVVTVPSSSLGTQTYICNVNHKPSNTKVDKKVEPKSCDKTH

SEQ ID NO: 704 - protein, 13 aa, Artificial
  YS55 CDRH3
SYYSSSYYSYYSS

SEQ ID NO: 705 - protein, 233 aa, Artificial
  YS55 Fab heavy chain
EVQLVESGGGLVQPGGSLRLSCAASGFSISSSSIHWVRQAPGKGLEWVASISPSSGSTYYADSVKGRFTISADTSKNTAYLQMNSLRAEDTAVYYCSRSYYSSSYYSYYSSAMDYWGQGTLVTVSSASTKGPSVFPLAPSSKSTSGGTAALGCLVKDYFPEPVTVSWNSGALTSGVHTFPAVLQSSGLYSLSSVVTVPSSSLGTQTYICNVNHKPSNTKVDKKVEPKSCDKTH

SEQ ID NO: 706 - protein, 233 aa, Artificial
  YS56 Fab heavy chain
EVQLVESGGGLVQPGGSLRLSCAASGFSISSSSIHWVRQAPGKGLEWVASISPYSGYTYYADSVKGRFTISADTSKNTAYLQMNSLRAEDTAVYYCSRSYYSSSYYSYYSSAMDYWGQGTLVTVSSASTKGPSVFPLAPSSKSTSGGTAALGCLVKDYFPEPVTVSWNSGALTSGVHTFPAVLQSSGLYSLSSVVTVPSSSLGTQTYICNVNHKPSNTKVDKKVEPKSCDKTH

SEQ ID NO: 707 - protein, 17 aa, Artificial
  YS57 CDRH2
SISPYSGSTYYADSVKG

SEQ ID NO: 708 - protein, 233 aa, Artificial
  YS57 Fab heavy chain
EVQLVESGGGLVQPGGSLRLSCAASGFYISSSSIHWVRQAPGKGLEWVASISPYSGSTYYADSVKGRFTISADTSKNTAYLQMNSLRAEDTAVYYCSRSYYSSSYYSYYSSAMDYWGQGTLVTVSSASTKGPSVFPLAPSSKSTSGGTAALGCLVKDYFPEPVTVSWNSGALTSGVHTFPAVLQSSGLYSLSSVVTVPSSSLGTQTYICNVNHKPSNTKVDKKVEPKSCDKTH

SEQ ID NO: 709 - protein, 13 aa, Artificial
  YS58 CDRH3
SYYSSSYYYYYSS

SEQ ID NO: 710 - protein, 233 aa, Artificial
  YS58 Fab heavy chain
EVQLVESGGGLVQPGGSLRLSCAASGFSISSSSIHWVRQAPGKGLEWVASISPYSGSTYYADSVKGRFTISADTSKNTAYLQMNSLRAEDTAVYYCSRSYYSSSYYYYYSSAMDYWGQGTLVTVSSASTKGPSVFPLAPSSKSTSGGTAALGCLVKDYFPEPVTVSWNSGALTSGVHTFPAVLQSSGLYSLSSVVTVPSSSLGTQTYICNVNHKPSNTKVDKKVEPKSCDKTH

SEQ ID NO: 711 - protein, 17 aa, Artificial
  YS59 CDRH2
SISPSYGYTSYADSVKG

SEQ ID NO: 712 - protein, 13 aa, Artificial
  YS59 CDRH3
SYYSSSYSSYYSS

SEQ ID NO: 713 - protein, 233 aa, Artificial
  YS59 Fab heavy chain
EVQLVESGGGLVQPGGSLRLSCAASGFSISSSSIHWVRQAPGKGLEWVASISPSYGYTSYADSVKGRFTISADTSKNTAYLQMNSLRAEDTAVYYCSRSYYSSSYSSYYSSAMDYWGQGTLVTVSSASTKGPSVFPLAPSSKSTSGGTAALGCLVKDYFPEPVTVSWNSGALTSGVHTFPAVLQSSGLYSLSSVVTVPSSSLGTQTYICNVNHKPSNTKVDKKVEPKSCDKTH

SEQ ID NO: 714 - protein, 233 aa, Artificial
  YS60 Fab heavy chain
EVQLVESGGGLVQPGGSLRLSCAASGFSISSSSIHWVRQAPGKGLEWVASISPYSGSTYYADSVKGRFTISADTSKNTAYLQMNSLRAEDTAVYYCSRSYYSSSYSSYYSSAMDYWGQGTLVTVSSASTKGPSVFPLAPSSKSTSGGTAALGCLVKDYFPEPVTVSWNSGALTSGVHTFPAVLQSSGLYSLSSVVTVPSSSLGTQTYICNVNHKPSNTKVDKKVEPKSCDKTH

SEQ ID NO: 715 - protein, 9 aa, Artificial
  YS61 CDRH1
GFSISSYSI

SEQ ID NO: 716 - protein, 17 aa, Artificial
  YS61 CDRH2
SISPYSGSTYYADSVKG

SEQ ID NO: 717 - protein, 233 aa, Artificial
  YS61 Fab heavy chain
EVQLVESGGGLVQPGGSLRLSCAASGFSISSYSIHWVRQAPGKGLEWVASISPYSGSTYYADSVKGRFTISADTSKNTAYLQMNSLRAEDTAVYYCSRSYYYSSYSSYYSSAMDYWGQGTLVTVSSASTKGPSVFPLAPSSKSTSGGTAALGCLVKDYFPEPVTVSWNSGALTSGVHTFPAVLQSSGLYSLSSVVTVPSSSLGTQTYICNVNHKPSNTKVDKKVEPKSCDKTH

SEQ ID NO: 718 - protein, 17 aa, Artificial
  YS62 CDRH2
SISPSSGYTYYADSVKG

SEQ ID NO: 719 - protein, 13 aa, Artificial
  YS62 CDRH3
SYYSSSYSSYYSS

SEQ ID NO: 720 - protein, 233 aa, Artificial
  YS62 Fab heavy chain
EVQLVESGGGLVQPGGSLRLSCAASGFSISYSSIHWVRQAPGKGLEWVASISPSSGYTYYADSVKGRFTISADTSKNTAYLQMNSLRAEDTAVYYCSRSYYSSSYSSYYSSAMDYWGQGTLVTVSSASTKGPSVFPLAPSSKSTSGGTAALGCLVKDYFPEPVTVSWNSGALTSGVHTFPAVLQSSGLYSLSSVVTVPSSSLGTQTYICNVNHKPSNTKVDKKVEPKSCDKTH

SEQ ID NO: 721 - protein, 13 aa, Artificial
  YS63 CDRH3
SSYSSSYYSYYSS

SEQ ID NO: 722 - protein, 233 aa, Artificial
  YS63 Fab heavy chain.
EVQLVESGGGLVQPGGSLRLSCAASGFSISSSSIHWVRQAPGKGLEWVASISPYSGYTYYADSVKGRFTISADTSKNTAYLQMNSLRAEDTAVYYCSRSSYSSSYYSYYSSAMDYWGQGTLVTVSSASTKGPSVFPLAPSSKSTSGGTAALGCLVKDYFPEPVTVSWNSGALTSGVHTFPAVLQSSGLYSLSSVVTVPSSSLGTQTYICNVNHKPSNTKVDKKVEPKSCDKTH

SEQ ID NO: 723 - protein, 17 aa, Artificial
  NNK1 CDRH2
SIAPYAGATAYADSVKG

SEQ ID NO: 724 - protein, 11 aa, Artificial
  NNK1 CDRH3
ESLAHWSAMDY

SEQ ID NO: 725 - protein, 250 aa, Artificial
  YADS2  heavy chain variant
MKKNIAFLLASMFVFSIATNAYAEVQLVESGGGLVQPGGSLRLSCAASGFAIYDYDIHWVRQAPGKGLEWVASIAPYAGATAYADSVKGRFTISADTSKNTAYLQMNSLRAEDTAVYYCSRESLAHWSAMDYWGQGTLVTVSSASTKGPSVFPLAPSSKSTSGGTAALGCLVKDYFPEPVTVSWNSGALTSGVHTFPAVLQSSGLYSLSSVVTVPSSSLGTQTYICNVNHKPSNTKVDKKVEPKSCDKTH

SEQ ID NO: 726 - protein, 17 aa, Artificial
  NNK2 CDRH2
LIAPYAGATAYADSVKG

SEQ ID NO: 727 - protein, 11 aa, Artificial
  NNK2 CDRH3
SSFAFWLAMDY

SEQ ID NO: 728 - protein, 250 aa, Artificial
  YADS2 heavy chain variant
MKKNIAFLLASMFVFSIATNAYAEVQLVESGGGLVQPGGSLRLSCAASGFAIYDYDIHWVRQAPGKGLEWVALIAPYAGATAYADSVKGRFTISADTSKNTAYLQMNSLRAEDTAVYYCSRSSFAFWLAMDYWGQGTLVTVSSASTKGPSVFPLAPSSKSTSGGTAALGCLVKDYFPEPVTVSWNSGALTSGVHTFPAVLQSSGLYSLSSVVTVPSSSLGTQTYICNVNHKPSNTKVDKKVEPKSCDKTH

SEQ ID NO: 729 - protein, 17 aa, Artificial
  NNK3 CDRH2
MIAPYAGATAYADSVKG

SEQ ID NO: 730 - protein, 11 aa, Artificial
  NNK3 CDRH3
TSFAFWNAMDY

SEQ ID NO: 731 - protein, 250 aa, Artificial
  YADS2 heavy chain variant
MKKNIAFLLASMFVFSIATNAYAEVQLVESGGGLVQPGGSLRLSCAASGFAIYDYDIHWVRQAPGKGLEWVAMIAPYAGATAYADSVKGRFTISADTSKNTAYLQMNSLRAEDTAVYYCSRTSFAFWNAMDYWGQGTLVTVSSASTKGPSVFPLAPSSKSTSGGTAALGCLVKDYFPEPVTVSWNSGALTSGVHTFPAVLQSSGLYSLSSVVTVPSSSLGTQTYICNVNHKPSNTKVDKKVEPKSCDKTH

SEQ ID NO: 732 - protein, 17 aa, Artificial
  NNK4 CDRH2
RIAPYAGATAYADSVKG

SEQ ID NO: 733 - protein, 11 aa, Artificial
  NNK4 CDRH3
SSFAFFSAMDY

SEQ ID NO: 734 - protein, 250 aa, Artificial
  YADS2 heavy chain variant
MKKNIAFLLASMFVFSIATNAYAEVQLVESGGGLVQPGGSLRLSCAASGFAIYDYDIHWVRQAPGKGLEWVARIAPYAGATAYADSVKGRFTISADTSKNTAYLQMNSLRAEDTAVYYCSRSSFAFFSAMDYWGQGTLVTVSSASTKGPSVFPLAPSSKSTSGGTAALGCLVKDYFPEPVTVSWNSGALTSGVHTFPAVLQSSGLYSLSSVVTVPSSSLGTQTYICNVNHKPSNTKVDKKVEPKSCDKTH

SEQ ID NO: 735 - protein, 17 aa, Artificial
  NNK5 CDRH2
SIAPYAGATAYADSVKG

SEQ ID NO: 736 - protein, 11 aa, Artificial
  NNK5 CDRH3
ASFAFFSAMDY

SEQ ID NO: 737 - protein, 250 aa, Artificial
  YADS2 heavy chain variant
MKKNIAFLLASMFVFSIATNAYAEVQLVESGGGLVQPGGSLRLSCAASGFAIYDYDIHWVRQAPGKGLEWVASIAPYAGATAYADSVKGRFTISADTSKNTAYLQMNSLRAEDTAVYYCSRASFAFFSAMDYWGQGTLVTVSSASTKGPSVFPLAPSSKSTSGGTAALGCLVKDYFPEPVTVSWNSGALTSGVHTFPAVLQSSGLYSLSSVVTVPSSSLGTQTYICNVNHKPSNTKVDKKVEPKSCDKTH

SEQ ID NO: 738 - protein, 11 aa, Artificial
  NNK6 CDRH2
  MISC_FEATURE (1)..(1): Xaa is any naturally occurring amino acid or a stop codon
XSLALYDAMDY

SEQ ID NO: 739 - protein, 250 aa, Artificial
  YADS2 Heavy Chain Variant
  MISC_FEATURE (122)..(122): Xaa is any naturally occurring amino acid or a stop codon
MKKNIAFLLASMFVFSIATNAYAEVQLVESGGGLVQPGGSLRLSCAASGFAIYDYDIHWVRQAPGKGLEWVADIAPYAGATAYADSVKGRFTISADTSKNTAYLQMNSLRAEDTAVYYCSRXSLALYDAMDYWGQGTLVTVSSASTKGPSVFPLAPSSKSTSGGTAALGCLVKDYFPEPVTVSWNSGALTSGVHTFPAVLQSSGLYSLSSVVTVPSSSLGTQTYICNVNHKPSNTKVDKKVEPKSCDKTH

SEQ ID NO: 740 - protein, 17 aa, Artificial
  NNK7 CDRH2
YIAPYAGATAYADSVKG

SEQ ID NO: 741 - protein, 11 aa, Artificial
  NNK7 CDRH3
FSFAFRMAMDY

SEQ ID NO: 742 - protein, 250 aa, Artificial
  YADS2 heavy chain variant
MKKNIAFLLASMFVFSIATNAYAEVQLVESGGGLVQPGGSLRLSCAASGFAIYDYDIHWVRQAPGKGLEWVAYIAPYAGATAYADSVKGRFTISADTSKNTAYLQMNSLRAEDTAVYYCSRFSFAFRMAMDYWGQGTLVTVSSASTKGPSVFPLAPSSKSTSGGTAALGCLVKDYFPEPVTVSWNSGALTSGVHTFPAVLQSSGLYSLSSVVTVPSSSLGTQTYICNVNHKPSNTKVDKKVEPKSCDKTH

SEQ ID NO: 743 - protein, 17 aa, Artificial
  NNK8 CDRH2
GIAPYAGATAYADSVKG

SEQ ID NO: 744 - protein, 11 aa, Artificial
  NNK8 CDRH3
GSFAFFGAMDY

SEQ ID NO: 745 - protein, 250 aa, Artificial
  YADS2 heavy chain variant
MKKNIAFLLASMFVFSIATNAYAEVQLVESGGGLVQPGGSLRLSCAASGFAIYDYDIHWVRQAPGKGLEWVAGIAPYAGATAYADSVKGRFTISADTSKNTAYLQMNSLRAEDTAVYYCSRGSFAFFGAMDYWGQGTLVTVSSASTKGPSVFPLAPSSKSTSGGTAALGCLVKDYFPEPVTVSWNSGALTSGVHTFPAVLQSSGLYSLSSVVTVPSSSLGTQTYICNVNHKPSNTKVDKKVEPKSCDKTH

SEQ ID NO: 746 - protein, 17 aa, Artificial
  NNK9 CDRH2
LIAPYADATAYADSVKG

SEQ ID NO: 747 - protein, 11 aa, Artificial
  NNK9 CDRH3
SSYARWSAMDY

SEQ ID NO: 748 - protein, 249 aa, Artificial
  YADS2 heavy chain variant
MKKNIAFLLASMFVFSIATNAYAEVQLVESGGGLVQPGGSLRLSCAASGFAIYDYDIHWVRQAPGKGLEWALIAPYADATAYADSVKGRFTISADTSKNTAYLQMNSLRAEDTAVYYCSRSSYARWSAMDYWGQGTLVTVSSASTKGPSVFPLAPSSKSTSGGTAALGCLVKDYFPEPVTVSWNSGALTSGVHTFPAVLQSSGLYSLSSVVTVPSSSLGTQTYICNVNHKPSNTKVDKKVEPKSCDKTH

SEQ ID NO: 749 - protein, 17 aa, Artificial
  NNK10 CDRH2
YIAPYAGATAYADSVKG

SEQ ID NO: 750 - protein, 11 aa, Artificial
  NNK10 CDRH3
SSYAFFRAMDY

SEQ ID NO: 751 - protein, 250 aa, Artificial
  YADS2 heavy chain variant
MKKNIAFLLASMFVFSIATNAYAEVQLVESGGGLVQPGGSLRLSCAASGFAIYDYDIHWVRQAPGKGLEWVAYIAPYAGATAYADSVKGRFTISADTSKNTAYLQMNSLRAEDTAVYYCSRSSYAFFRAMDYWGQGTLVTVSSASTKGPSVFPLAPSSKSTSGGTAALGCLVKDYFPEPVTVSWNSGALTSGVHTFPAVLQSSGLYSLSSVVTVPSSSLGTQTYICNVNHKPSNTKVDKKVEPKSCDKTH

SEQ ID NO: 752 - protein, 17 aa, Artificial
  NNK11 CDRH2
IIAPYAGATAYADSVKG

SEQ ID NO: 753 - protein, 11 aa, Artificial
  NNK11 CDRH3
SSYAFFRAMDY

SEQ ID NO: 754 - protein, 250 aa, Artificial
  YADS2 heavy chain variant
MKKNIAFLLASMFVFSIATNAYAEVQLVESGGGLVQPGGSLRLSCAASGFAIYDYDIHWVRQAPGKGLEWVHIIAPYAGATAYADSVKGRFTISADTSKNTAYLQMNSLRAEDTAVYYCSASSYAFFRAMDYWGQGTLVTVSSASTKGPSVFPLAPSSKSTSGGTAALGCLVKDYFPEPVTVSWNSGALTSGVHTFPAVLQSSGLYSLSSVVTVPSSSLGTQTYICNVNHKPSNTKVDKKVEPKSCDKTH

SEQ ID NO: 755 - protein, 17 aa, Artificial
  NNK12 CDRH2
VIAPYAGATAYADSVKG

SEQ ID NO: 756 - protein, 11 aa, Artificial
  NNK12 CDRH3
NSFAFFGAMDY

SEQ ID NO: 757 - protein, 250 aa, Artificial
  YADS2 heavy chain variant
MKKNIAFLLASMFVFSIATNAYAEVQLVESGGGLVQPGGSLRLSCAASGFAIYDYDIHWVRQAPGKGLEWVAVIAPYAGATAYADSVKGRFTISADTSKNTAYLQMNSLRAEDTAVYYCSRNSFAFFGAMDYWGQGTLVTVSSASTKGPSVFPLAPSSKSTSGGTAALGCLVKDYFPEPVTVSWNSGALTSGVHTFPAVLQSSGLYSLSSVVTVPSSSLGTQTYICNVNHKPSNTKVDKKVEPKSCDKTH

SEQ ID NO: 758 - protein, 17 aa, Artificial
  NNK13 CDRH2
FIAPYAGATAYADSVKG

SEQ ID NO: 759 - protein, 11 aa, Artificial
  NNK13 CDRH3
SSFAFWMAMDY

SEQ ID NO: 760 - protein, 250 aa, Artificial
  YADS2 heavy chain variant
MKKNIAFLLASMFVFSIATNAYAEVQLVESGGGLVQPGGSLRLSCAASGFAIYDYDIHWVRQAPGKGLEWVAFIAPYAGATAYADSVKGRFTISADTSKNTAYLQMNSLRAEDTAVYYCSRSSFAFWMAMDYWGQGTLVTVSSASTKGPSVFPLAPSSKSTSGGTAALGCLVKDYFPEPVTVSWNSGALTSGVHTFPAVLQSSGLYSLSSVVTVPSSSLGTQTYICNVNHKPSNTKVDKKVEPKSCDKTH

SEQ ID NO: 761 - protein, 11 aa, Artificial
  NNK14 CDRH3
GSFAFWSAMDY

SEQ ID NO: 762 - protein, 250 aa, Artificial
  YADS2 heavy chain variant
MKKNIAFLLASMFVFSIATNAYAEVQLVESGGGLVQPGGSLRLSCAASGFAIYDYDIHWVRQAPGKGLEWVAFIAPYAGATAYADSVKGRFTISADTSKNTAYLQMNSLRAEDTAVYYCSRGSFAFWSAMDYWGQGTLVTVSSASTKGPSVFPLAPSSKSTSGGTAALGCLVKDYFPEPVTVSWNSGALTSGVHTFPAVLQSSGLYSLSSVVTVPSSSLGTQTYICNVNHKPSNTKVDKKVEPKSCDKTH

SEQ ID NO: 763 - protein, 11 aa, Artificial
  NNK15 CDRH3
NSFAFFGAMDY

SEQ ID NO: 764 - protein, 250 aa, Artificial; identical to SEQ ID NO: 757
  YADS2 heavy chain variant

SEQ ID NO: 765 - protein, 17 aa, Artificial
  NNK16 CDRH2
NIAPYAGATAYADSVKG

SEQ ID NO: 766 - protein, 11 aa, Artificial
  NNK16 CDRH3
SSFAFFMAMDY

SEQ ID NO: 767 - protein, 250 aa, Artificial
  YADS2 heavy chain variant
MKKNIAFLLASMFVFSIATNAYAEVQLVESGGGLVQPGGSLRLSCAASGFAIYDYDIHWVRQAPGKGLEWVANIAPYAGATAYADSVKGRFTISADTSKNTAYLQMNSLRAEDTAVYYCSRSSFAFFMAMDYWGQGTLVTVSSASTKGPSVFPLAPSSKSTSGGTAALGCLVKDYFPEPVTVSWNSGALTSGVHTFPAVLQSSGLYSLSSVVTVPSSSLGTQTYICNVNHKPSNTKVDKKVEPKSCDKTH

SEQ ID NO: 768 - protein, 17 aa, Artificial
  NNK17 CDRH2
VIAPYAGATAYADSVKG

SEQ ID NO: 769 - protein, 250 aa, Artificial; identical to SEQ ID NO: 757
  YADS2 heavy chain variant

SEQ ID NO: 770 - protein, 17 aa, Artificial
  NNK18 CDRH2
FIAPYAGATAYADSVKG

SEQ ID NO: 771 - protein, 11 aa, Artificial
  NNK18 CDRH3
RSFAFYNAMDY

SEQ ID NO: 772 - protein, 250 aa, Artificial
  YADS2 heavy chain variant
MKKNIAFLLASMFVFSIATNAYAEVQLVESGGGLVQPGGSLRLSCAASGFAIYDYDIHWVRQAPGKGLEWVAFIAPYAGATAYADSVKGRFTISADTSKNTAYLQMNSLRAEDTAVYYCSRRSFAFYNAMDYWGQGTLVTVSSASTKGPSVFPLAPSSKSTSGGTAALGCLVKDYFPEPVTVSWNSGALTSGVHTFPAVLQSSGLYSLSSVVTVPSSSLGTQTYICNVNHKPSNTKVDKKVEPKSCDKTH

SEQ ID NO: 773 - protein, 11 aa, Artificial
  NNK19 CDRH3
SSFAFYGAMDY

SEQ ID NO: 774 - protein, 250 aa, Artificial
  YADS2 heavy chain variant
MKKNIAFLLASMFVFSIATNAYAEVQLVESGGGLVQPGGSLRLSCAASGFAIYDYDIHWVRQAPGKGLEWVAFIAPYAGATAYADSVKGRFTISADTSKNTAYLQMNSLRAEDTAVYYCSRSSFAFYGAMDYWGQGTLVTVSSASTKGPSVFPLAPSSKSTSGGTAALGCLVKDYFPEPVTVSWNSGALTSGVHTFPAVLQSSGLYSLSSVVTVPSSSLGTQTYICNVNHKPSNTKVDKKVEPKSCDKTH

SEQ ID NO: 775 - protein, 11 aa, Artificial
  NNK20 CDRH3
SSFAFKAAMDY

SEQ ID NO: 776 - protein, 250 aa, Artificial
  YADS2 heavy chain variant
MKKNIAFLLASMFVFSIATNAYAEVQLVESGGGLVQPGGSLRLSCAASGFAIYDYDIHWVRQAPGKGLEWVAFIAPYAGATAYADSVKGRFTISADTSKNTAYLQMNSLRAEDTAVYYCSRSSFAFKAAMDYWGQGTLVTVSSASTKGPSVFPLAPSSKSTSGGTAALGCLVKDYFPEPVTVSWNSGALTSGVHTFPAVLQSSGLYSLSSVVTVPSSSLGTQTYICNVNHKPSNTKVDKKVEPKSCDKTH

SEQ ID NO: 777 - protein, 17 aa, Artificial
  NNK21 CDRH2
AIAPYAGATAYADSVKG

SEQ ID NO: 778 - protein, 11 aa, Artificial
  NNK21 CDRH3
LSFALYNAMDY

SEQ ID NO: 779 - protein, 250 aa, Artificial
  YADS2 heavy chain variant
MKKNIAFLLASMFVFSIATNAYAEVQLVESGGGLVQPGGSLRLSCAASGFAIYDYDIHWVRQAPGKGLEWVAAIAPYAGATAYADSVKGRFTISADTSKNTAYLQMNSLRAEDTAVYYCSRLSFALYNAMDYWGQGTLVTVSSASTKGPSVFPLAPSSKSTSGGTAALGCLVKDYFPEPVTVSWNSGALTSGVHTFPAVLQSSGLYSLSSVVTVPSSSLGTQTYICNVNHKPSNTKVDKKVEPKSCDKTH

SEQ ID NO: 780 - protein, 17 aa, Artificial
  NNK22 CDRH2
YIAPYAGATAYADSVKG

SEQ ID NO: 781 - protein, 11 aa, Artificial
  NNK22 CDRH3
VSWAFFQAMDY

SEQ ID NO: 782 - protein, 250 aa, Artificial
  YADS2 heavy chain variant
MKKNIAFLLASMFVFSIATNAYAEVQLVESGGGLVQPGGSLRLSCAASGFAIYDYDIHWVRQAPGKGLEWVAYIAPYAGATAYADSVKGRFTISADTSKNTAYLQMNSLRAEDTAVYYCSRVSWAFFQAMDYWGQGTLVTVSSASTKGPSVFPLAPSSKSTSGGTAALGCLVKDYFPEPVTVSWNSGALTSGVHTFPAVLQSSGLYSLSSVVTVPSSSLGTQTYICNVNHKPSNTKVDKKVEPKSCDKTH

SEQ ID NO: 783 - protein, 17 aa, Artificial
  NNK23 CDRH2
WIAPYAGATAYADSVKG

SEQ ID NO: 784 - protein, 11 aa, Artificial
  NNK23 CDRH3
LSLAYFHAMDY

SEQ ID NO: 785 - protein, 250 aa, Artificial
  YADS2 heavy chain variant
MKKNIAFLLASMFVFSIATNAYAEVQLVESGGGLVQPGGSLRLSCAASGFAIYDYDIHWVRQAPGKGLEWVAWIAPYAGATAYADSVKGRFTISADTSKNTAYLQMNSLRAEDTAVYYCSRLSLAYFHAMDYWGQGTLVTVSSASTKGPSVFPLAPSSKSTSGGTAALGCLVKDYFPEPVTVSWNSGALTSGVHTFPAVLQSSGLYSLSSVVTVPSSSLGTQTYICNVNHKPSNTKVDKKVEPKSCDKTH

SEQ ID NO: 786 - protein, 17 aa, Artificial
  NNK24 CDRH2
VIAPYAGATAYADSVKG

SEQ ID NO: 787 - protein, 11 aa, Artificial
  NNK24 CDRH3
NSFAFFGAMDY

SEQ ID NO: 788 - protein, 250 aa, Artificial; identical to SEQ ID NO: 757
  YADS2 heavy chain variant

SEQ ID NO: 789 - protein, 11 aa, Artificial
  NNK25 CDRH3
ISFAFFGAMDY

SEQ ID NO: 790 - protein, 250 aa, Artificial
  YADS2 heavy chain variant
MKKNIAFLLASMFVFSIATNAYAEVQLVESGGGLVQPGGSLRLSCAASGFAIYDYDIHWVRQAPGKGLEWVAVIAPYAGATAYADSVKGRFTISADTSKNTAYLQMNSLRAEDTAVYYCSRISFAFFGAMDYWGQGTLVTVSSASTKGPSVFPLAPSSKSTSGGTAALGCLVKDYFPEPVTVSWNSGALTSGVHTFPAVLQSSGLYSLSSVVTVPSSSLGTQTYICNVNHKPSNTKVDKKVEPKSCDKTH

SEQ ID NO: 791 - protein, 11 aa, Artificial
  NNK26 CDRH3
SSFAHMHAMDY

SEQ ID NO: 792 - protein, 250 aa, Artificial
  YADS2 heavy chain variant
MKKNIAFLLASMFVFSIATNAYAEVQLVESGGGLVQPGGSLRLSCAASGFAIYDYDIHWVRQAPGKGLEWVASIAPYAGATAYADSVKGRFTISADTSKNTAYLQMNSLRAEDTAVYYCSRSSFAHMHAMDYWGQGTLVTVSSASTKGPSVFPLAPSSKSTSGGTAALGCLVKDYFPEPVTVSWNSGALTSGVHTFPAVLQSSGLYSLSSVVTVPSSSLGTQTYICNVNHKPSNTKVDKKVEPKSCDKTH

SEQ ID NO: 793 - protein, 17 aa, Artificial
  NNK27 CDRH2
VIAPYAGATAYADSVKG

SEQ ID NO: 794 - protein, 250 aa, Artificial
  YADS2 heavy chain variant
MKKNIAFLLASMFVFSIATNAYAEVQLVESGGGLVQPGGSLRLSCAASGFAIYDYDIHWVRQAPGKGLEWVAVIAPYAGATAYADSVKGRFTISADTSKNTAYLQMNSLRAEDTAVYYCSRNSFAFFGDMDYWGQGTLVTVSSASTKGPSVFPLAPSSKSTSGGTAALGCLVKDYFPEPVTVSWNSGALTSGVHTFPAVLQSSGLYSLSSVVTVPSSSLGTQTYICNVNHKPSNTKVDKKVEPKSCDKTH

SEQ ID NO: 795 - protein, 10 aa, Artificial
  YS #1 CDR-H1
GFYISSSSIH

SEQ ID NO: 796 - protein, 17 aa, Artificial
  YS #1 CDR-H2
SISPSSGSTIYADSVKG

SEQ ID NO: 797 - protein, 15 aa, Artificial
  YS #1 CDR-H3
YYSSSSSYSYSAMDY

SEQ ID NO: 798 - protein, 231 aa, Artificial
  YS #1 HC
EVQLVESGGGLVQPGGSLRLSCAASGFYISSSSIHWVRQAPGKGLEWVASISPSSGSTIYADSVKGRFTISADTSKNTAYLQMNSLRAEDTAVYYCSRYYSSSSSYSYSAMDYWGQGTLVTVSSASTKGPSVFPLAPSSKSTSGGTAALGCLVKDYFPEPVTVSWNSGALTSGVHTFPAVLQSSGLYSLSSVVTVPSSSLGTQTYICNVNHKPSNTKVDKKVEPKSCDKTH

SEQ ID NO: 799 - protein, 5 aa, Artificial
  YS #2 CDR-H1
GFIIH

SEQ ID NO: 800 - protein, 17 aa, Artificial
  YS #2 CDR-H2
YIYPSYGSTSYADSVKG

SEQ ID NO: 801 - protein, 17 aa, Artificial
  YS #2 CDR-H3
YYYSSYSSSYYSSAMDY

SEQ ID NO: 802 - protein, 228 aa, Artificial
  YS #2 HC
EVQLVESGGGLVQPGGSLRLSCAASGFIIHWVRQAPGKGLEWVAYIYPSYGSTSYADSVKGRFTISADTSKNTAYLQMNSLRAEDTAVYYCSRYYYSSYSSSYYSSAMDYWGQGTLVTVSSASTKGPSVFPLAPSSKSTSGGTAALGCLVKDYFPEPVTVSWNSGALTSGVHTFPAVLQSSGLYSLSSVVTVPSSSLGTQTYICNVNHKPSNTKVDKKVEPKSCDKTH

SEQ ID NO: 803 - protein, 10 aa, Artificial
  YS #3 CDR-H1
GFYISSSSIH

SEQ ID NO: 804 - protein, 17 aa, Artificial
  YS #3 CDR-H2
SISPYSGYTYYADSVKG

SEQ ID NO: 805 - protein, 17 aa, Artificial
  YS #3 CDR-H3
SYYSSSYSSYYSSAMDY

SEQ ID NO: 806 - protein, 233 aa, Artificial; identical to SEQ ID NO: 701
  YS #3 HC

SEQ ID NO: 807 - protein, 10 aa, Artificial
  YS #4 CDR-H1
GFSISSSSIH

SEQ ID NO: 808 - protein, 17 aa, Artificial
  YS #4 CDR-H2
SISPSSGSTYYADSVKG

SEQ ID NO: 809 - protein, 17 aa, Artificial
  YS #4 CDR-H3
SYYSSSYSSYYSSAMDY

SEQ ID NO: 810 - protein, 233 aa, Artificial; identical to SEQ ID NO: 703
  YS #4 HC

SEQ ID NO: 811 - protein, 5 aa, Artificial
  YS #5 CDR-H1
GFIIH

SEQ ID NO: 812 - protein, 17 aa, Artificial
  YS #5 CDR-H2
SISPSSGSTYYADSVKG

SEQ ID NO: 813 - protein, 17 aa, Artificial
  YS #5 CDR-H3
SYYSSSYYSYYSSAMDY

SEQ ID NO: 814 - protein, 228 aa, Artificial
  YS #5 HC
EVQLVESGGGLVQPGGSLRLSCAASGFIIHWVRQAPGKGLEWVASISPSSGSTYYADSVKGRFTISADTSKNTAYLQMNSLRAEDTAVYYCSRSYYSSSYYSYYSSAMDYWGQGTLVTVSSASTKGPSVFPLAPSSKSTSGGTAALGCLVKDYFPEPVTVSWNSGALTSGVHTFPAVLQSSGLYSLSSVVTVPSSSLGTQTYICNVNHKPSNTKVDKKVEPKSCDKTH

SEQ ID NO: 815 - protein, 10 aa, Artificial
  YS #6 CDR-H1
GFSISSSSIH

SEQ ID NO: 816 - protein, 17 aa, Artificial
  YS #6 CDR-H2
SISPYSGYTYYADSVKG

SEQ ID NO: 817 - protein, 17 aa, Artificial
  YS #6 CDR-H3
SYYSSSYYSYYSSAMDY

SEQ ID NO: 818 - protein, 233 aa, Artificial; identical to SEQ ID NO: 706
  YS #6 HC

SEQ ID NO: 819 - protein, 10 aa, Artificial
  YS #7 CDR-H1
GFYISSSSIH

SEQ ID NO: 820 - protein, 17 aa, Artificial
  YS #7 CDR-H2
SISPYSGSTYYADSVKG

SEQ ID NO: 821 - protein, 17 aa, Artificial
  YS #7 CDR-H3
SYYSSSYYSYYSSAMDY

SEQ ID NO: 822 - protein, 233 aa, Artificial; identical to SEQ ID NO: 708
  YS #7 HC

SEQ ID NO: 823 - protein, 10 aa, Artificial
  YS #8 CDR-H1
GFSISSSSIH

SEQ ID NO: 824 - protein, 17 aa, Artificial
  YS #8 CDR-H2
SISPYSGSTYYADSVKG

SEQ ID NO: 825 - protein, 17 aa, Artificial
  YS #8 CDR-H3
SYYSSSYYYYYSSAMDY

SEQ ID NO: 826 - protein, 233 aa, Artificial; identical to SEQ ID NO: 710
  YS #8 HC

SEQ ID NO: 827 - protein, 10 aa, Artificial
  YS #9 CDR-H1
GFSISSSSIH

SEQ ID NO: 828 - protein, 17 aa, Artificial
  YS #9 CDR-H2
SISPSYGYTSYADSVKG

SEQ ID NO: 829 - protein, 17 aa, Artificial
  YS #9 CDR-H3
SYYSSSYSSYYSSAMDY

SEQ ID NO: 830 - protein, 233 aa, Artificial; identical to SEQ ID NO: 713
  YS #9 HC

SEQ ID NO: 831 - protein, 10 aa, Artificial
  YS #10 CDR-H1
GFSISSSSIH

SEQ ID NO: 832 - protein, 17 aa, Artificial
  YS #10 CDR-H2
SISPYSGSTYYADSVKG

SEQ ID NO: 833 - protein, 17 aa, Artificial
  YS #10 CDR-H3
SYYSSSYSSYYSSAMDY

SEQ ID NO: 834 - protein, 233 aa, Artificial; identical to SEQ ID NO: 714
  YS #10 HC

SEQ ID NO: 835 - protein, 10 aa, Artificial
  YS #11 CDR-H1
GFSISSYSIH

SEQ ID NO: 836 - protein, 17 aa, Artificial
  YS #11 CDR-H2
SISPYSGSTYYADSVKG

SEQ ID NO: 837 - protein, 17 aa, Artificial
  YS #11 CDR-H3
SSYSSSYSSYYSSAMDY

SEQ ID NO: 838 - protein, 233 aa, Artificial
  YS #11 HC
EVQLVESGGGLVQPGGSLRLSCAASGFSISSSSIHWVRQAPGKGLEWVASISPYSGSTYYADSVKGRFTISADTSKNTAYLQMNSLRAEDTAVYYCSRSSYSSSYSSYYSSAMDYWGQGTLVTVSSASTKGPSVFPLAPSSKSTSGGTAALGCLVKDYFPEPVTVSWNSGALTSGVHTFPAVLQSSGLYSLSSVVTVPSSSLGTQTYICNVNHKPSNTKVDKKVEPKSCDKTH

SEQ ID NO: 839 - protein, 5 aa, Artificial
  YS #12 CDR-H1
GFIIH

SEQ ID NO: 840 - protein, 17 aa, Artificial
  YS #12 CDR-H2
SISPSSGSTSYADSVKG

SEQ ID NO: 841 - protein, 17 aa, Artificial
  YS #12 CDR-H3
SYSYSSYSYSYSYAMDY

SEQ ID NO: 842 - protein, 228 aa, Artificial
  YS #12 HC
EVQLVESGGGLVQPGGSLRLSCAASGFIIHWVRQAPGKGLEWVASISPSSGSTSYADSVKGRFTISADTSKNTAYLQMNSLRAEDTAVYYCSRSYSYSSYSYSYSYAMDYWGQGTLVTVSSASTKGPSVFPLAPSSKSTSGGTAALGCLVKDYFPEPVTVSWNSGALTSGVHTFPAVLQSSGLYSLSSVVTVPSSSLGTQTYICNVNHKPSNTKVDKKVEPKSCDKTH

SEQ ID NO: 843 - protein, 10 aa, Artificial
  YS #13 CDR-H1
GFSISSSSIH

SEQ ID NO: 844 - protein, 17 aa, Artificial
  YS #13 CDR-H2
YISPYSGSTSYADSVKG

SEQ ID NO: 845 - protein, 19 aa, Artificial
  YS #13 CDR-H3
YYYSYYSSSYSSYYYAMDY

SEQ ID NO: 846 - protein, 235 aa, Artificial
  YS #13 HC
EVQLVESGGGLVQPGGSLRLSCAASGFSISSSSIHWVRQAPGKGLEWVAYISPYSGSTSYADSVKGRFTISADTSKNTAYLQMNSLRAEDTAVYYCSRYYYSYYSSSYSSYYYAMDYWGQGTLVTVSSASTKGPSVFPLAPSSKSTSGGTAALGCLVKDYFPEPVTVSWNSGALTSGVHTFPAVLQSSGLYSLSSVVTVPSSSLGTQTYICNVNHKPSNTKVDKKVEPKSCDKTH

SEQ ID NO: 847 - protein, 10 aa, Artificial
  YS #14 CDR-H1
GFSIYSSSIH

SEQ ID NO: 848 - protein, 17 aa, Artificial
  YS #14 CDR-H2
YISPYSGSTSYADSVKG

SEQ ID NO: 849 - protein, 16 aa, Artificial
  YS #14 CDR-H3
YYSSSYSYSYYYAMDY

SEQ ID NO: 850 - protein, 232 aa, Artificial; identical to SEQ ID NO: 670
  YS #14 HC

SEQ ID NO: 851 - protein, 10 aa, Artificial
  YS #15 CDR-H1
GFSISYSSIH

SEQ ID NO: 852 - protein, 17 aa, Artificial
  YS #15 CDR-H2
YISPYSGSTSYADSVKG

SEQ ID NO: 853 - protein, 19 aa, Artificial
  YS #15 CDR-H3
YSSYSSSSYYSSYYYAMDY

SEQ ID NO: 854 - protein, 235 aa, Artificial
  YS #15 HC
EVQLVESGGGLVQPGGSLRLSCAASGFSISYSSIHWVRQAPGKGLEWVAYISPYSGSTSYADSVKGRFTISADTSKNTAYLQMNSLRAEDTAVYYCSRYSSYSSSSYYSSYYYAMDYWGQGTLVTVSSASTKGPSVFPLAPSSKSTSGGTAALGCLVKDYFPEPVTVSWNSGALTSGVHTFPAVLQSSGLYSLSSVVTVPSSSLGTQTYICNVNHKPSNTKVDKKVEPKSCDKTH

SEQ ID NO: 855 - protein, 10 aa, Artificial
  YS #16 CDR-H1
GFSIYYSSIH

SEQ ID NO: 856 - protein, 17 aa, Artificial
  YS #16 CDR-H2
YISPSSGSTSYADSVKG

SEQ ID NO: 857 - protein, 16 aa, Artificial
  YS #16 CDR-H3
YYSSSSYYSYYYAMDY

SEQ ID NO: 858 - protein, 232 aa, Artificial
  YS #16 HC
EVQLVESGGGLVQPGGSLRLSCAASGFSIYYSSIHWVRQAPGKGLEWVAYISPSSGSTSYADSVKGRFTISADTSKNTAYLQMNSLRAEDTAVYYCSRYYSSSSYYSYYYAMDYWGQGTLVTVSSASTKGPSVFPLAPSSKSTSGGTAALGCLVKDYFPEPVTVSWNSGALTSGVHTFPAVLQSSGLYSLSSVVTVPSSSLGTQTYICNVNHKPSNTKVDKKVEPKSCDKTH

SEQ ID NO: 859 - protein, 10 aa, Artificial
  YS #17 CDR-H1
GFSISSSSIH

SEQ ID NO: 860 - protein, 17 aa, Artificial
  YS #17 CDR-H2
YISPSSGSTSYADSVKG

SEQ ID NO: 861 - protein, 16 aa, Artificial
  YS #17 CDR-H3
YYSSSYYYSYYYAMDY

SEQ ID NO: 862 - protein, 232 aa, Artificial; identical to SEQ ID NO: 43
  YS #17 HC

SEQ ID NO: 863 - protein, 10 aa, Artificial
  YS #18 CDR-H1
GFSIYSSSIH

SEQ ID NO: 864 - protein, 17 aa, Artificial
  YS #18 CDR-H2
YISPSSGSTSYADSVKG

SEQ ID NO: 865 - protein, 16 aa, Artificial
  YS #18 CDR-H3
YYYSYSSYSYYYAMDY

SEQ ID NO: 866 - protein, 232 aa, Artificial; identical to SEQ ID NO: 672
  YS #18 HC

SEQ ID NO: 867 - protein, 10 aa, Artificial
  YS #19 CDR-H1
GFSISYSSIH

SEQ ID NO: 868 - protein, 17 aa, Artificial
  YS #19 CDR-H2
YISPYSGSTSYADSVKG

SEQ ID NO: 869 - protein, 18 aa, Artificial
  YS #19 CDR-H3
YYSSYSYYSSSYYYAMDY

SEQ ID NO: 870 - protein, 234 aa, Artificial; identical to SEQ ID NO: 594
  YS #19 HC

SEQ ID NO: 871 - protein, 10 aa, Artificial
  YS #20 CDR-H1
GFSISYSSIH

SEQ ID NO: 872 - protein, 17 aa, Artificial
  YS #20 CDR-H2
YISPSSGSTSYADSVKG

SEQ ID NO: 873 - protein, 16 aa, Artificial
  YS #20 CDR-H3
YYSSSSYYSYYYAMDY

SEQ ID NO: 874 - protein, 232 aa, Artificial
  YS #20 HC
EVQLVESGGGLVQPGGSLRLSCAASGFSIYSSSIHWVRQAPGKGLEWVAYISPSSGSTSYADSVKGRFTISADTSKNTAYLQMNSLRAEDTAVYYCSRYYSSSSYYSYYYAMDYWGQGTLVTVSSASTKGPSVFPLAPSSKSTSGGTAALGCLVKDYFPEPVTVSWNSGALTSGVHTFPAVLQSSGLYSLSSVVTVPSSSLGTQTYICNVNHKPSNTKVDKKVEPKSCDKTH

SEQ ID NO: 875 - protein, 10 aa, Artificial
  YS #21 CDR-H1
GFSIYSSSIH

SEQ ID NO: 876 - protein, 17 aa, Artificial
  YS #21 CDR-H2
SISPYSGSTSYADSVKG

SEQ ID NO: 877 - protein, 11 aa, Artificial
  YS #21 CDR-H3
STYAFFSAMDY

SEQ ID NO: 878 - protein, 227 aa, Artificial
  YS #21 HC
EVQLVESGGGLVQPGGSLRLSCAASGFSIYSSSIHWVRQAPGKGLEWVASISPYSGSTSYADSVKGRFTISADTSKNTAYLQMNSLRAEDTAVYYCSRSTYAFFSAMDYWGQGTLVTVSSASTKGPSVFPLAPSSKSTSGGTAALGCLVKDYFPEPVTVSWNSGALTSGVHTFPAVLQSSGLYSLSSVVTVPSSSLGTQTYICNVNHKPSNTKVDKKVEPKSCDKTH

SEQ ID NO: 879 - protein, 10 aa, Artificial
  YS #22 CDR-H1
GFSIYSYSIH

SEQ ID NO: 880 - protein, 17 aa, Artificial
  YS #22 CDR-H2
SISPYSGSTSYADSVKG

SEQ ID NO: 881 - protein, 11 aa, Artificial
  YS #22 CDR-H3
SSYAFFSAMDY

SEQ ID NO: 882 - protein, 227 aa, Artificial
  YS #22 HC
EVQLVESGGGLVQPGGSLRLSCAASGFSIYSYSIHWVRQAPGKGLEWVASISPYSGSTSYADSVKGRFTISADTSKNTAYLQMNSLRAEDTAVYYCSRSSYAFFSAMDYWGQGTLVTVSSASTKGPSVFPLAPSSKSTSGGTAALGCLVKDYFPEPVTVSWNSGALTSGVHTFPAVLQSSGLYSLSSVVTVPSSSLGTQTYICNVNHKPSNTKVDKKVEPKSCDKTH

SEQ ID NO: 883 - protein, 10 aa, Artificial
  YS #23 CDR-H1
GFSISSYSIH

SEQ ID NO: 884 - protein, 17 aa, Artificial
  YS #23 CDR-H2
YISPYSGSTSYADSVKG

SEQ ID NO: 885 - protein, 11 aa, Artificial
  YS #23 CDR-H3
SSYAFFGAMDY

SEQ ID NO: 886 - protein, 227 aa, Artificial
  YS #23 HC
EVQLVESGGGLVQPGGSLRLSCAASGFSISSYSIHWVRQAPGKGLEWVAYISPYSGSTSYADSVKGRFTISADTSKNTAYLQMNSLRAEDTAVYYCSRSSYAFFGAMDYWGQGTLVTVSSASTKGPSVFPLAPSSKSTSGGTAALGCLVKDYFPEPVTVSWNSGALTSGVHTFPAVLQSSGLYSLSSVVTVPSSSLGTQTYICNVNHKPSNTKVDKKVEPKSCDKTH

SEQ ID NO: 887 - protein, 10 aa, Artificial
  YS #24 CDR-H1
GFYISSYSIH

SEQ ID NO: 888 - protein, 17 aa, Artificial
  YS #24 CDR-H2
SISPYSGSTSYADSVKG

SEQ ID NO: 889 - protein, 11 aa, Artificial
  YS #24 CDR-H3
TSYAFFGAMDY

SEQ ID NO: 890 - protein, 227 aa, Artificial
  YS #24 HC
EVQLVESGGGLVQPGGSLRLSCAASGFYISSYSIHWVRQAPGKGLEWVASISPYSGSTSYADSVKGRFTISADTSKNTAYLQMNSLRAEDTAVYYCSRTSYAFFGAMDYWGQGTLVTVSSASTKGPSVFPLAPSSKSTSGGTAALGCLVKDYFPEPVTVSWNSGALTSGVHTFPAVLQSSGLYSLSSVVTVPSSSLGTQTYICNVNHKPSNTKVDKKVEPKSCDKTH

SEQ ID NO: 891 - protein, 10 aa, Artificial
  YS #25 CDR-H1
GFSIYSYSIH

SEQ ID NO: 892 - protein, 17 aa, Artificial
  YS #25 CDR-H2
SISPYSGSTSYADSVKG

SEQ ID NO: 893 - protein, 11 aa, Artificial
  YS #25 CDR-H3
SSFAFFSAMDY

SEQ ID NO: 894 - protein, 227 aa, Artificial
  YS #25 HC
EVQLVESGGGLVQPGGSLRLSCAASGFSIYSYSIHWVRQAPGKGLEWVASISPYSGSTSYADSVKGRFTISADTSKNTAYLQMNSLRAEDTAVYYCSRSSFAFFSAMDYWGQGTLVTVSSASTKGPSVFPLAPSSKSTSGGTAALGCLVKDYFPEPVTVSWNSGALTSGVHTFPAVLQSSGLYSLSSVVTVPSSSLGTQTYICNVNHKPSNTKVDKKVEPKSCDKTH

SEQ ID NO: 895 - protein, 10 aa, Artificial
  YS #26 CDR-H1
GFSIYSYSIH

SEQ ID NO: 896 - protein, 17 aa, Artificial
  YS #26 CDR-H2
SISPSYGSTYYADSVKG

SEQ ID NO: 897 - protein, 11 aa, Artificial
  YS #26 CDR-H3
SSFAFFGAMDY

SEQ ID NO: 898 - protein, 227 aa, Artificial
  YS #26 HC
EVQLVESGGGLVQPGGSLRLSCAASGFSIYSYSIHWVRQAPGKGLEWVASISPSYGSTYYADSVKGRFTISADTSKNTAYLQMNSLRAEDTAVYYCSRSSFAFFGAMDYWGQGTLVTVSSASTKGPSVFPLAPSSKSTSGGTAALGCLVKDYFPEPVTVSWNSGALTSGVHTFPAVLQSSGLYSLSSVVTVPSSSLGTQTYICNVNHKPSNTKVDKKVEPKSCDKTH

SEQ ID NO: 899 - protein, 10 aa, Artificial
  YS #27 CDR-H1
GFSIYSSSIH

SEQ ID NO: 900 - protein, 17 aa, Artificial
  YS #27 CDR-H2
SISPYSGSTSYADSVKG

SEQ ID NO: 901 - protein, 11 aa, Artificial
  YS #27 CDR-H3
STFAFYSAMDY

SEQ ID NO: 902 - protein, 227 aa, Artificial
  YS #27 HC
EVQLVESGGGLVQPGGSLRLSCAASGFSIYSSSIHWVRQAPGKGLEWVASISPYSGSTSYADSVKGRFTISADTSKNTAYLQMNSLRAEDTAVYYCSRSTFAFYSAMDYWGQGTLVTVSSASTKGPSVFPLAPSSKSTSGGTAALGCLVKDYFPEPVTVSWNSGALTSGVHTFPAVLQSSGLYSLSSVVTVPSSSLGTQTYICNVNHKPSNTKVDKKVEPKSCDKTH

SEQ ID NO: 903 - protein, 10 aa, Artificial
  YS #28 CDR-H1
GFSISYSSIH

SEQ ID NO: 904 - protein, 17 aa, Artificial
  YS #28 CDR-H2
SISPYSGYTSYADSVKG

SEQ ID NO: 905 - protein, 23 aa, Artificial
  YS #28 CDR-H3
SSYYYSSSYYYYYSSYSSSAMDY

SEQ ID NO: 906 - protein, 239 aa, Artificial
  YS #28 HC
EVQLVESGGGLVQPGGSLRLSCAASGFSISYSSIHWVRQAPGKGLEWVASISPYSGYTSYADSVKGRFTISADTSKNTAYLQMNSLRAEDTAVYYCSRSSYYYSSSYYYYYSSYSSSAMDYWGQGTLVTVSSASTKGPSVFPLAPSSKSTSGGTAALGCLVKDYFPEPVTVSWNSGALTSGVHTFPAVLQSSGLYSLSSVVTVPSSSLGTQTYICNVNHKPSNTKVDKKVEPKSCDKTH

SEQ ID NO: 907 - protein, 10 aa, Artificial
  YS #29 CDR-H1
GFSISYSSIH

SEQ ID NO: 908 - protein, 17 aa, Artificial
  YS #29 CDR-H2
SISPYSGYTSYADSVKG

SEQ ID NO: 909 - protein, 23 aa, Artificial
  YS #29 CDR-H3
SSYYYPPSYYYYNSSYSSSAMDY

SEQ ID NO: 910 - protein, 239 aa, Artificial
  YS #29 HC
EVQLVESGGGLVQPGGSLRLSCAASGFSISYSSIHWVRQAPGKGLEWVASISPYSGYTSYADSVKGRFTISADTSKNTAYLQMNSLRAEDTAVYYCSRSSYYYPPSYYYYNSSYSSSAMDYWGQGTLVTVSSASTKGPSVFPLAPSSKSTSGGTAALGCLVKDYFPEPVTVSWNSGALTSGVHTFPAVLQSSGLYSLSSVVTVPSSSLGTQTYICNVNHKPSNTKVDKKVEPKSCDKTH

SEQ ID NO: 911 - protein, 10 aa, Artificial
  YS #30 CDR-H1
GFSIYYSSIH

SEQ ID NO: 912 - protein, 17 aa, Artificial
  YS #30 CDR-H2
SIYPYSGSTSYADSVKG

SEQ ID NO: 913 - protein, 24 aa, Artificial
  YS #30 CDR-H3
YYSYYSSYYYSSSSSSSYSSAMDY

SEQ ID NO: 914 - protein, 240 aa, Artificial
  YS #30 HC
EVQLVESGGGLVQPGGSLRLSCAASGFSIYYSSIHWVRQAPGKGLEWVASIYPYSGSTSYADSVKGRFTISADTSKNTAYLQMNSLRAEDTAVYYCSRYYSYYSSYYYSSSSSSSYSSAMDYWGQGTLVTVSSASTKGPSVFPLAPSSKSTSGGTAALGCLVKDYFPEPVTVSWNSGALTSGVHTFPAVLQSSGLYSLSSVVTVPSSSLGTQTYICNVNHKPSNTKVDKKVEPKSCDKTH

SEQ ID NO: 915 - protein, 7 aa, Artificial
  CDRH3
  MISC_FEATURE (1)..(1): Xaa is Tyr or Phe
  MISC_FEATURE (2)..(2): Xaa is Val or Ala
  MISC_FEATURE (4)..(4): Xaa is Phe or Tyr
  MISC_FEATURE (5)..(5): Xaa is Leu or Ala
  MISC_FEATURE (6)..(6): Xaa is Pro or Ala
  MISC_FEATURE (7)..(7): Xaa is Tyr or Phe
XXFXXXX

SEQ ID NO: 916 - protein, 6 aa, Artificial
  CDRL1
  MISC_FEATURE (1)..(2): Xaa is any amino acid
  MISC_FEATURE (3)..(4): Xaa is Arg
  MISC_FEATURE (5)..(5): Xaa is Ser or Ala
XXXXXL

SEQ ID NO: 917 - protein, 3 aa, Artificial
  CDRL2
  MISC_FEATURE (1)..(1): Xaa is Ser or Ala or Gly
  MISC_FEATURE (2)..(3): Xaa is any amino acid
XXX

SEQ ID NO: 918 - protein, 6 aa, Artificial
  CDRL3
  MISC_FEATURE (2)..(3): Xaa is any amino acid
  MISC_FEATURE (4)..(4): Xaa is Ser or Ala
SXXXPL

SEQ ID NO: 919 - protein, 6 aa, Artificial
  CDRL2
  MISC_FEATURE (1)..(1): Xaa is Ser, Ala or Gly
  MISC_FEATURE (4)..(4): Xaa is any amino acid
  MISC_FEATURE (6)..(6): Xaa is any amino acid
XASXLX

SEQ ID NO: 920 - DNA, 27 bp, Artificial
  Terminator Sequence
gctcggttgccgccgggcgttttttat

SEQ ID NO: 921 - protein, 6 aa, Artificial
  B29 CDRH1
TGSGIH

SEQ ID NO: 922 - protein, 18 aa, Artificial
  B29 CDRH2
GWIYPYSGNTYYADSVKG

SEQ ID NO: 923 - protein, 12 aa, Artificial
  B29 CDRH3
ALWAFVPAAMDY

SEQ ID NO: 924 - protein, 228 aa, Artificial
  B29 heavy chain
EVQLVESGGGLVQPGGSLRLSCAASGFTITGSGIHWVRQAPGKGLEWVGAIYPYSGYTNYADSVKGRFTISADTSKNTAYLQMNSLRAEDTAVYYCARALWAFVPAAMDYWGQGTLVTVSSASTKGPSVFPLAPSSKSTSGGTAALGCLVKDYFPEPVTVSWNSGALTSGVHTFPAVLQSSGLYSLSSVVTVPSSSLGTQTYICNVNHKPSNTKVDKKVEPKSCDKTH

SEQ ID NO: 925 - protein, 6 aa, Artificial
  C3 CDRH1
TGSSIH

SEQ ID NO: 926 - protein, 18 aa, Artificial
  C3 CDRH2
ARISPAGGYTDYADSVKG

SEQ ID NO: 927 - protein, 228 aa, Artificial
  C3 heavy chain
EVQLVESGGGLVQPGGSLRLSCAASGFTITGSSIHWVRQAPGKGLEWVARISPAGGYTDYADSVKGRFTISADTSKNTAYLQMNSLRAEDTAVYYCARYFRWYMPAAMDYWGQGTLVTVSSASTKGPSVFPLAPSSKSTSGGTAALGCLVKDYFPEPVTVSWNSGALTSGVHTFPAVLQSSGLYSLSSVVTVPSSSLGTQTYICNVNHKPSNTKVDKKVEPKSCDKTH

SEQ ID NO: 928 - protein, 12 aa, Artificial
  C3 CDRH3
YFRWYMPAAMDY

1. An antibody capable of binding to mouse VEGF and human VEGF with Kd values within 10 fold of the other and is capable of inhibiting the binding of VEGF to a VEGF receptor.

2. The antibody according to claim 1, wherein the antibody is capable of binding to a human VEGF G88A mutant with a Kd value that is within 10 fold of the Kd value of unmutated human VEGF.

3. The antibody according to claim 1, wherein the antibody is capable of binding a human VEGF G88A mutant with a Kd value that is 10 nM or less.

4. The antibody according to claim 1, wherein the antibody contacts no more than 80% of the surface area of G88 of human VEGF.

5. The antibody according to claim 1, wherein the receptor is a VEGF receptor 2 (KDR).

6. The antibody according to claim 1, wherein the receptor is a VEGF receptor 1 (Flt-1).

7. The antibody according to claim 1, the antibody is capable of inhibiting the binding of VEGF to VEGF receptor 1 and VEGF receptor 2.

8. The antibody according to claim 1, wherein the antibody binds to mouse and human VEGF with Kd values of 10 nM or less.

9. The antibody according to claim 1, wherein the antibody binds to mouse and human VEGF with Kd values of 2 nM or less.

10. The antibody according to claim 1, wherein the antibody binds to human VEGF with an on-rate (kₒₙ) of 1.0 or more (10 M⁻¹ S⁻¹).

11. The antibody according to claim 1, wherein the antibody binds to the 20s helix of VEGF.

12. The antibody according to claim 1, wherein the antibody binds to the 80s loop of VEGF.

13. The antibody according to claim 1, wherein the antibody binds to the 20s helix and 80s loop of VEGF.

14. The antibody according to claim 1, wherein the antibody has a functional epitope comprising residue F17 of human VEGF.

15. The antibody according to claim 1, wherein the antibody has a functional epitope comprising residues F17 and I83 of human VEGF.

16. The antibody according to claim 1, wherein the antibody has a functional epitope comprising residues F17, I83 and Q89 of human VEGF.

17. The antibody according to claim 1, wherein the antibody has a functional epitope comprising residues F17 and M18 of human VEGF.

18. The antibody according to claim 1, wherein the antibody has a functional epitope comprising residues F17, M18 and I89 of human VEGF.

19. The antibody according to claim 1, wherein the antibody has a functional epitope comprising residues F17, Y21 and Y25 of human VEGF.

20. The antibody according to claim 1, wherein the antibody has a functional epitope comprising residues F17, Y21, Q22, Y25, D63 and I83 of human VEGF.

21. The antibody according to claim 1, wherein the antibody has a functional epitope comprising residues F17, Y21, Y25 and Q89 of human VEGF.

22. The antibody according to claim 1, wherein the antibody has a functional epitope comprising residues F17, M18, D19, Y21, Y25, Q89, I91, K101, E103 and C104 of human VEGF.

23. The antibody according to claim 1, wherein the antibody has a functional epitope comprising residues F17, Y21, Q22, Y25, D63, I83 and Q89 of human VEGF.

24. The antibody according to claim 1, wherein the antibody has a functional epitope comprising a combination of any of the residues selected from the group consisting of F17, M18, Y21, Q22, Y25, K48, D63, L66, I83, H86, Q89, I91, C104 and P106 of human VEGF.

25. The antibody according to claim 1, wherein the antibody has a functional epitope comprising the residues F17, M18, Y21, Q22, Y25, K48, D63, L66, I83, H86, Q89, I91, C104 and P106 of human VEGF.

26. The antibody according to claim 1, wherein the antibody comprises a CDR-H3 comprising the contiguous amino acid sequence X₁X₂FX₄X₅X₆X₇, wherein
X₁ is Y or F;
X₂ is V or A;
X₄ is F or Y;
X₅ is L or A;
X₆ is P or A; and
X₇ is Y or F.

27. The antibody according to claim 26, wherein the CDR-H2 comprises a contiguous amino acid sequence GX₂TPX₅G, wherein
X₂ is a I or V or other hydrophobic amino acid; and
X₅ is any amino acid residue.

28. The antibody according to claim 27, wherein the CDR-H1 comprises a contiguous amino acid sequence X₁X₂X_{3z}IH, wherein
X₁ is any amino acid residue;
X₂ is Y or F; and
X₃ is W or L.

29. The antibody according to claim 1, wherein the antibody comprises the CDR-H3 sequence of any one of the antibodies of FIGS. 2, 7, 24-29 and 34-43.

30. The antibody according to claim 1, wherein the antibody comprises a variable region comprising a sequence of any one of the antibodies of FIGS. 2, 7, 24-29 and 34-43.

31. An antibody comprising the CDR-H1 sequence, CDR-H2 sequence and CDR-H3 sequence of any one of the antibodies of FIGS. 2, 7, 24-29 and 34-43.

32. An antibody comprising a variable region comprising a sequence described in any one of the antibodies of FIGS. 2, 7, 24-29 and 34-43.

33. The antibody of any one of claims 1 and 26, further comprising the framework regions of the G6 antibody.

34. An antibody comprising:
(a) a CDR-L1 comprising the contiguous amino acid sequence X₁X₂X₃X₄X₅L, wherein:
X₁ and X₂ are any amino acid;
Either X₃ or X₄ or both X₃ and X₄ are R;
X₅ is S or A.
(b) a CDR-L2 comprising a contiguous amino acid sequence X₁X₂X₃, wherein
X₁ is S or A or G; and
X₂ and X₃ is any amino acid residue.
(c) a CDR-L3 comprising a contiguous amino acid sequence SX₁X₂X₃PL, wherein
X₁ and X₂ are any amino acid residue; and
X₃ is S or A.

35. The antibody according to claim 34, wherein the antibody comprises the framework regions of the B20-4.1 antibody.

36. The antibody according to claim 26, wherein the antibody binds human VEGF and mouse VEGF with Kd values within 10 fold of each other.

37. The antibody according to claim 1, wherein the antibody is a monoclonal antibody.

38. The antibody according to claim 1, wherein the antibody is a bispecific antibody.

39. The antibody according to claim 1, wherein the antibody is a synthetic antibody.

40. A synthetic antibody capable of binding hVEGF with a Kd value of no more than about 2 nM.

41. The antibody of claim 40, wherein the Kd value is no more than about 1 nM.

42. The antibody of claim 41, wherein the Kd value is no more than about 500 pM.

43. The antibody of claim 42, which is capable of binding to a VEGF from a non-human mammal species with a Kd value that is within 10 fold of the Kd value for hVEGF binding.

44. The antibody of claim 43 44, wherein the VEGF from a non-human mammal is murine VEGF.

45. The antibody of claim 40 comprising at least one variant CDR having a variant amino acid in at least one solvent accessible and highly diverse amino acid position, wherein the variant amino acid is encoded by a nonrandom codon set, and wherein at least 70% of the amino acids encoded by the nonrandom set are target amino acids for that position in known antibody variable domains.

46. The antibody of claim 45 having a heavy chain variable domain which comprises at least 1, 2 or 3 variant CDRs selected from the group consisting of CDR H1, H2 and H3.

47. The antibody of claim 46, wherein the heavy chain variable domain comprises a variant CDR H3.

48. The antibody of claim 46, comprising following amino acid sequence as its heavy chain variable domain (VH) and first heavy chain constant domain (CH1):
(SEQ ID NO. 29)
EVQLVESGGGLVQPGGSLRLSCAASGFTISDYWIHWVRQAPGKGLEWVAG
ITPAGGYTYYADSVKGRFTISADTSKNTAYLQMNSLRAEDTAVYYCARFV
FFLPYAMDYWGQGTLVTVSSASTKGPSVFPLAPSSKSTSGGTAALGCLVK
DYFPEPVTVSWNSGALTSGVHTFPAVLQSSGLYSLSSVVTVPSSSLGTQT
YICNVNHKPSNTKVDKKVEPKSCDKTH.

49. The antibody of claim 48, further comprising following amino acid sequence as its light chain:
(SEQ ID NO. 28)
DIQMTQSPSSLSASVGDRVTITCRASQDVSTAVAWYQQKPGKAPKLLIYS
ASFLYSGVPSRFSGSGSGTDFTLTISSLQPEDFATYYCQQSYTTPPTFGQ
GTKVEIKRTVAAPSVFIFPPSDEQLKSGTASVVCLLNNFYPREAKVQWKV
DNALQSGNSQESVTEQDSKDSTYSLSSTLTLSKADYEKHKVYACEVTHQG
LSSPVTKSFNRGEC.

50. The antibody of claim 45, having a light chain variable domain which comprises at least 1, 2 or 3 variant CDRs selected from the group consisting of CDR L1, L2 and L3.

51. The antibody of claim 48, further comprising following amino acid sequence as its light chain:
(SEQ ID NO. 30)
DIQMTQSPSSLSASVGDRVTITCRASQDVSTAVAWYQQKPGKAPKLLLYS
ASFLYSGVPSRFSGSGSGTDFTLTISSLQPEDFATYYCKQGYANPWTFGQ
GTKVEIKRTVAAPSVFIFPPSDEQLKSGTASVVCLLNNFYPREAKVQWKV
DNALQSGNSQESVTEQDSKDSTYSLSSTLTLSKADYEKHKVYACEVTHQG
LSSPVTKSFNRGEC.

52. A method of selecting a hVEGF antibody from a library of synthetic antibodies comprising:
a) generating the library of synthetic antibodies having a designed diversity in at least one of the CDRs;
b) contacting the library with hVEGF to form binders;
c) separating the binders from the nonbinders, and eluting the binders from the target hVEGF and incubating the binders in a solution with decreasing amounts of the target hVEGF in a concentration from about 0.1 nM to 1000 nM; and
d) selecting the binders that can bind to the lowest concentration of the target VEGF and that have an affinity of about 500 pM to 2 nM.

53. Isolated nucleic acid encoding the antibody of any one of claims 1, 26, 29 and 40.

54. A vector comprising the nucleic acid of claim 53.

55. A host cell transformed with the vector of claim 54.

56. A process of producing an antibody comprising culturing the host cell of claim 55 so that the nucleic acid is expressed.

57. The process of claim 56 further comprising recovering the antibody from the host cell culture.

58. The process of claim 57 wherein the antibody is recovered from the host cell culture medium.

59. A method of using the antibody of claim 1 for treating a disorder associated with pathological angiogenesis in a mammal in need of treatment thereof comprising the step of administering said antibody to the mammal.

60. The method of claim 59, wherein the disorder is cancer or age related macular degeneration.

61. The method of claim 60, wherein the cancer is from the group consisting of breast cancer, colorectal cancer, pancreatic cancer non-small cell lung cancer, non-Hodgkins lymphoma (NHL), renal cancer, prostate cancer, liver cancer, head and neck cancer, melanoma, ovarian cancer, mesothelioma, and multiple myeloma.

62. The method of claim 61, wherein the treatment further comprises the step of administering a second therapeutic agent simultaneously or sequentially with the antibody.

63. The method of claim 62, wherein the second therapeutic agent is an agent selected from the group consisting of an anti-angiogenic agent, an anti-neoplastic composition, a chemotherapeutic agent and a cytotoxic agent.

64. The method of claim 63 wherein the anti-angiogenic agent is an anti-hVEGF antibody capable of binding to the same VEGF epitope as the antibody A4.6.1.

65. A method of treating a mammal suffering from or at risk of developing an inflammatory or immune disorder comprising the step of treating the mammal with a Fab antibody of claim 1.

66. The method according to claim 65, wherein the inflammatory or immune disorder is rheumatoid arthritis.

67. The method according to claim 65 wherein the Fab antibody is a G6 series antibody.

68. The method according to claim 65, wherein the Fab antibody is a B20 series antibody.

69. The antibody according to claim 29, wherein the CDR-H3 sequence comprises FVFFLPY.

70. The antibody according to claim 29, wherein CDR-H3 sequence comprises FVFFLPYAMDY.

71. The antibody according to claim 29, wherein the CDR-H3 sequence comprises WGHSTSPW.

72. The antibody according to claim 29, wherein the CDR-H3 sequence comprises WGHSTSPWAMDY.

73. The antibody according to claim 29, wherein the CDR-H3 sequence comprises ALWAFVA.

74. The antibody according to claim 29, wherein the CDR-H3 sequence comprises YFRWYMA.
